(19) United States
(12) Patent Application Publication
(10) Pub. No.: US 2003/0165870 A1
(43) Pub. Date: Sep. 4, 2003

(54) Novel sequences of E. coli CFT073

(76) Inventors: Frederick R. Blattner, Madison, WI (US); Rodney A. Welch, Madison, WI (US); Valerie D. Burland, Cross Plains, WI (US)

Correspondence Address: Nicholas J. Seay, One South Pinckney Street, Stuite 600, P.O. Box 2113, Madison, WI, 53701-2113, US

(21) Appl. No.: 10/085,959

(22) Filed: Mar. 1, 2002

(51) Int. Cl. C12Q 1/68; C07H 21/04; C12N 1/21

(52) U.S. Cl. 435/6; 435/252.33; 536/23.7

(57) ABSTRACT

The entire genome of pathogenic E. coli strain CFT073 has been sequenced. Nearly all of the genomic DNA sequences present in CFT073 and absent in the previously sequenced laboratory strain K-12 are presented here.

### STATEMENT REGARDING FEDERALLY SPONSORED RESEARCH OR DEVELOPMENT

[0001] This invention was made with United States government support awarded by the following agency: NIH A144387. The United States has certain rights in this invention.

### CROSS-REFERENCE TO RELATED APPLICATION

[0002] Not applicable.

### BACKGROUND OF THE INVENTION

[0003] Escherichia coil is a common enteric bacterial strain that has both laboratory and human health importance. One particular strain of E. coli, designated CFT073 is a human pathogen that causes urinary tract infections. Urinary tract infections are common in various populations throughout the human life span. Infant boys, women of childbearing years, and aged people of both sexes have relatively high incidences of this infection. Acute pyelonephritis, a bacterial infection of the kidneys, is a common complication of such infections. Acute pyelonephritis often requires hospitalization for treatment, and the disease can be severe including complications or life threatening conditions.

[0004] Various strains of E. coil are associated with urinary tract infections and are commonly found in the urine of patients with pyelonephritis. Certain phenotypes of E. coil are found more often in such association. The strains associated with acute pyelonephritis often include a set of gene functions which, as a unit, have been thought to form a set of virulence factors that allow specific clones of E. coli to cause pyelonephritis.

[0005] Accordingly to investigate diagnosis or treatment of this disease, it is appropriate to focus the inquiry on the presumptive virulence factors. Most, if not all, of those virulence factors are present in the strain CFT073, which is known to be the among the most virulent of all of the E. coil strains associated with these diseases. The strain CFT073 has been previously shown to contain a pathogenicity island associated with uropathogenicity. Kao, JS et al., Infect Immun. 65:7, pp.2812-2920 (1997).

[0006] Modem geneticists have been working to resolve the genetic code of many organisms. Great efforts have been made to sequence the human genome. The effort to sequence the genomes of whole organisms began with an effort to sequence the genome of E. coli. For the original effort to sequence the E. coli genome, a useful and common laboratory strain, designated K-12, was chosen. The entire genome of that strain was sequenced and published. Science, 277:1453-1462 (1997). Since the genes which are responsible for the pathogenicity of E. coli CFT073 are missing from strain K-12, the sequence of the K-12 genome is of limited help in developing tools to detect, hinder or destroy E. coli CFT073.

### BRIEF SUMMARY OF THE INVENTION

[0007] It is an object of the present invention to provide the DNA sequence present in E. coli CFT073 which is not present in non-pathogenic E. coli to enable detection, diagnosis, prophylaxis and therapeutic tools to combat bacterial infections.

[0008] It is another object of the present invention to provide a means to detect E. coli CFT073 in an infection of an environmental sample.

[0009] It is yet another object of this invention to provide a means for the early diagnosis of humans and livestock infected with CFT073.

[0010] Another object of the present invention is to provide a means of treating humans and livestock infected with CFT073.

[0011] It is a further object of the present invention to provide a means for the prevention of infection by CFT073.

[0012] The present invention includes many DNA sequences that are unique to E. coli CFT073.

[0013] One aspect of the present invention is two CFT073 DNA sequences that encode hemagglutinin-like proteins that are important for host cell adhesion.

[0014] Another aspect of the present invention is two CFT073 DNA sequences that encode for autotransporters.

[0015] Another aspect of the present invention is a CFT073 DNA sequence that encodes for a RTX-like protein.

[0016] Still another aspect of the present invention is a method for detecting E. coli CFT073 and distinguishing the strain from other strains of E. coli by genetic analysis and testing.

[0017] It is a feature of the invention disclosed here that virtually the entire genome of E. coli CFT073 is set forth in the data contained here, combined with the information already published in the field.

### BRIEF DESCRIPTION OF THE SEVERAL VIEWS OF THE DRAWINGS

[0018] Not applicable.

### DETAILED DESCRIPTION OF THE INVENTION

[0019] The investigators here have sequenced virtually the entire genome of E. coli CFT073. Presented in this specification is essentially all the DNA sequence which is contained in the genome of E. coli strain CFT073 and not found in the previously sequenced non-pathogenic laboratory E. coli strain K-12. The genome sequence is essentially complete, lacking only an occasional presumably small sequence linkage between established long sequences known. The availability of the sequence data presented here will enable intelligent design of diagnostic detection, prophylaxis and therapeutic tools for disease and infections caused by this organism.

[0020] The sequence of E. coli CFT073 was, in brief, performed by shotgun cloning and duplicative random sequence analysis followed by computer assembly into contigs. The contigs determined by shot gun clone sequencing were assembled using computer software designed for that purpose.

[0021] An important analysis which has begun on this sequence data is the identification of genetic sequences associated with the pathogenesis of infection, which sequences provide information essential to the diagnosis, treatment, and prevention of infection by uropathogenic E. coli strains. In order to facilitate the identification of genes involved in the pathogenesis of infection by uropathogenic E. coli strains for use in detection of the pathogen, and in the diagnosis, treatment, and prevention of uropathogenic infection, the entire genomic DNA sequence of E. coli CFT073 was compared with that of E. coli K-12, a nonpathogenic laboratory strain as published in Science, 277:1453-62 (1997).

[0022] Attached to this patent application is a sequence listing containing essentially all of the DNA sequence in the CFT073 genome, represented by the contigs mentioned above, that are not present in the K-12 genome. This sequence is present in the sequence listing as SEQ ID NO:1 through SEQ ID NO:251 and SEQ ID NO:254.

[0023] By definition, the genetic material in the sequences disclosed in this invention is sufficient for pathogenicity in humans since strain CFT073 is highly pathogenic while K-12 is not. In addition, analysis of the open reading frames (ORFs) and computer comparisons to sequences from other pathogens have allowed identification of several of the ORFs which code for proteins specifically associated with pathogenicity. We provide five examples of such ORFs. The first one (ORF1) is between nucleotide 12003 and nucleotide 20509 of SEQ ID NO:25 1. ORF1 is a putative member of the ShlA/HecA/Fha exoprotein family that shows a 25% identity over 2,311 residues to a probable hemagglutinin (the nucleotide sequence GenBank accession number for the probable hemagglutinin is AE004443). The second one (ORF2) is between nucleotide 31940 and nucleotide 34668 of SEQ ID NO:254. ORF2 is a member of the Shl/Fha/Hpm family and amino acids 33-907 of ORF2 shows a 26% identity to amino acids 1,912-2,818 of hemagglutinin/hemolysin-related protein (the amino acid sequence and the nucleotide sequence GenBank accession numbers are AAG03431 and AE002405, respectively). Both ORF1 and ORF2 are believed to be important for host cell adhesion and thus infection.

[0024] The third one (ORF3) is the complementary sequence between nucleotide 1008 and nucleotide 1885 of SEQ ID NO:85. ORF3 is a member of the autotransporter family and is 57% identical over 292 residues to a putative beta-barrel outer membrane protein (the nucleotide sequence GenBank accession number is AE005210). The fourth one (ORF4) is the complementary sequence between nucleotide 1996 and nucleotide 5607 of SEQ ID NO:85. ORF4 is also a member of the autotransporter family. ORF4 has a 31% identity over 1103 residues to YapD protein (the nucleotide sequence GenBank accession number is AJ277627) and a 27% identity over 2952 residues to YapH protein (the nucleotide sequence GenBank accession number is AJ277631). Both ORF3 and ORF4 as autotransporters are believed to be important virulence factors of CFT073.

[0025] The fifth one (ORF5) is between nucleotide 40329 and nucleotide 44950 of SEQ ID NO:251. ORF5 is similar to RTX family members and is 23% identical over 1,461 residues to a putative RTX family exoprotein (the nucleotide sequence GenBank accession number is AE005229). ORF5 is believed to be an exotoxin like RTX.

[0026] In addition to the diagnostic value, the DNA sequences of ORF1-5 are also useful for treatment and prevention purposes. For example, antisense oligonucleotides can be designed given the knowledge of these sequences to block the expression of the corresponding proteins. One of ordinary skill knows how to design and use antisense oligonucleotides. Along the same line, the corresponding amino acid sequences of ORF1-5 or an immunogenic fragment thereof are also valuable for diagnosis, treatment and prevention of uropathogenic E. coli strains. For example, the corresponding amino acid sequences or an immunogenic fragment thereof can be used to generate antibodies that can be used for diagnosis, treatment and prevention purposes. One of ordinary skill in the art knows how to produce antibodies to the proteins encoded by ORF1-5. Vaccines may also be produced using the amino acid sequence information. It is well within the knowledge of a skilled artisan to generate vaccines.

[0027] The specific CFT073 strain from which the sequence data is derived is available from ATCC as ATCC 700928. One wishing to practice the present invention using one of the disclosed DNA sequences can do so by isolating the sequence from ATCC 700928 using knowledge of the nucleotide sequence and standard methods known to one of ordinary skill in the art.

[0028] It is expected that minor sequence variations in E. coli CFT073-specific nucleotide sequences associated with nucleotide additions, deletions, and mutations, whether naturally occurring or introduced in vitro, would not interfere with the usefulness of these sequences in the detection of uropathogenic E. coli, in methods for preventing urinary tract infection, and in methods for treating pyelonephritis. Therefore, the scope of the present invention is intended to encompass minor variations in the claimed sequences, which include both DNA and RNA and can also contain non-standard bases such as inosine.

[0029] Another utility enabled by the disclosure here is the detection of pathogenic E. coli strains by nucleic acid hybridization assays. Such assays, using techniques well known in the art, are made possible by the sequence information contained here, which enables the selection of CFT073-specific probes. By an E. coli CFT073-specific nucleotide probe, it is meant a sequence that is able to hybridize to E. coli CFT073 target DNA present in a sample containing E. coli CFT073 under suitable hybridization conditions and which does not hybridize with DNA from other E. coli strains or from other bacterial species. In particular, a CFT073 specific probe will bind to CFT073 DNA but not to DNA from K-12. This permits the intelligent design of DNA probes for use in hybridization assays for the presence of CFT073 strains. It is well within the ability of one skilled in the art to determine suitable hybridization conditions, based on probe length, G+C content, and the degree of stringency required for a particular application.

[0030] The probe may be RNA or DNA. Depending on the detection means employed, the probe may be unlabeled, radiolabeled, or labeled with a dye. The probe may be hybridized with a sample that has been immobilized on a solid support such as nitrocellulose or a nylon membrane, or the probe may be immobilized on a solid support, such as a silicon chip.

[0031] The sample to be tested may include blood, urine, feces, or other materials from a human or a livestock animal. Alternatively, the sample may include food intended for human consumption. The sample may be tested directly, or may be treated in some manner prior to testing. For example, the sample may be subjected to PCR amplification using appropriate oligonucleotide primers.

[0032] Any means of detecting DNA-RNA or DNA-DNA hybridization known to the art may be used in the present invention.

[0033] Again, presented in this specification is a sequence listing constituting essentially all of the DNA sequence in the CFT073 genome that do not appear in strain K-12, which is presented as SEQ ID NO:1 to SEQ ID NO:251 and SEQ ID NO:254. Since all of these sequences are diagnostic of CFT073, as compared to K-12, sequence information from any of these sequences can be used to design diagnostic probes useful to distinguish strain CFT073 from strain K-12 using molecular techniques. To have reasonable assurance of success under conditions of variable stringency, it is preferred that such diagnostic probes use sequences which are at least 25 nucleotides or longer in length. Any 25-mer selected from amongst any of the sequences in any of SEQ ID NO:1 through SEQ ID NO:25 1 and SEQ ID NO:254 may be used for such a probe.

The application's sequence listing, which the Patent Office published only in electronic form, follows.

SEQUENCE LISTING (255 sequences)

SEQ ID NO: 1 - DNA, 171 bp, Escherichia coli
tcagattgttgataaagtgctcgtggttgatgccggatgcggcgtaaacgccttatccgacctacaaaatcatgcaaattcaatatattgcatggcttgtgtaggcccgataagcttgcgcatcgggcgattcgatgtttgtcatcagtcttaagcggctaacaacgccgc

SEQ ID NO: 2 - DNA, 309 bp, Escherichia coli
taagttatctgcattatcagttttagccagataattgttattgttaactgaccagataattaagggaacatatggaaataaagacacggagagaaaccaggcagacgttggcgcagtggtttgaagagaagggaaggcaggcggttagacaggaggtaagtcaggaattcgcccaacgttttctgaataaagggatgtctcgggaagacgttgcagaggtgacagctttatctcttgcagagattgataagctaattaactctaactaagttgtctacgatatgaataattgcttacagatgacgtggc

SEQ ID NO: 3 - DNA, 125 bp, Escherichia coli
tgcttgttgaatacctgaatttgacagtaatgtctgcactggggcctgtttctctccacttttggtctcccggacccactccgtaatcattcccaacaagatagctgacgttatcatcggtgccg

SEQ ID NO: 4 - DNA, 277 bp, Escherichia coli
tgagattttgatgcaatgccatgtaactgaacgttactttgttaatgatgtttgtttgttttttactaagtattacattcattcatcattgggacagctattttgcataatgccatgacatatgcaatttaattttactaaatatgaaaattagtaaaattaactttaaaaaattaagggagtggtgtatggaattagaatttcgggaaggtatattatattttctgtgtttttatttatcttaaatatattattatttgcaatagcttaaggttat

SEQ ID NO: 5 - DNA, 66 bp, Escherichia coli
ctgtataccaaagaccaggaggcactcaaggcgagtccatgtttaagtatcccgcagtctcaatgg

SEQ ID NO: 6 - DNA, 59 bp, Escherichia coli
catctgatatctataatttagaccgtagtgactttgattttggcgctcacccgaatccg

SEQ ID NO: 7 - DNA, 121 bp, Escherichia coli
ttctatgggatggattagcacatttatcttcattttgcgaattacatgacagtccgaaacaagatgaaaaagtatttaaaaaaaagggggaaaatgagtaggacgaattattctgagccag

SEQ ID NO: 8 - DNA, 1465 bp, Escherichia coli
gaactgaaccccaaaacctggacagtttcagttaaccggctttttgatactcagtccggtattctaccgggctgagtcccccaagactgagttttattcttttttgattccagtaagttatgtattcgttaacggcattttccagctcttctacatttctgtagtcccggcgatagtacatttcttctttcaggtgaccaaagaagttctccattaccgcattatcaaggcagttgcccttgcgcgacatgctctgcactaaccctctgtccgccagggcggactgataactttttatccggtaatgccatccttgatcactgtggagcagcggtttctccccttcagcaaggctttccagacccttatttaacatccgcttcaccagctcttctgtaggcctgcaggccgtttcccacgccacgatttccccgttaaacaaatcaagtatcggggacaggtacagtttttgtccgccagccctgaattcggtgatatctgtcacccatttctcacagggagcttccgctttgaactgtcgctgaaggatattttctgcagcgagtcccatatttccccggtaagaccggtatttcttcaggcgcacaggagacttcaggccgagctgttgcatcagttttcgcaccgttttgccactgaacttaagacctcttttctgaagctcacaatggatccgccggtacccataacatccccggtgttcatggaagatggaggctatgagctgtttcacatcagcatacttgtccttagccttctgcagtgacagctggtagtacagcgtgcttctgccctgcggcctttaacaggtcagactggcagtgtccgtacctcaggctctggatgactttcgttttttctccagctcctggcgctttttttccagaagatgctcctgcatggctttcagatatgcattttctgcgcgaagataacgcagctcattcttcatctcttccggcgtcatgtttgcctcgttttcatgggtatcatcagaacgggtcatgcttttctccttcctgcgcctgataaaggcctcattaccagatttgcggtagccttttatccagtttttaaccgtgttgtggctgggaatgttaaaccgggcagctacccggggtagagactcagaatgcccgagagcataaagaaccacgcaaagtttatcttcaggagaatagctacgcttgtgtctgcaatccagtgcccgaggaccgtgaagaagaaaaagattaatccagtgtgagaggctggtgtgagaaagttgaaagagttttgccgtagaaatgatgcctgcatgaccagccaggtaatgatttacagcggcaagttttacttcaaatgaatgtttcataaactgcaccttcagatgtcagattatgtccaacatttggggtgcagttcagttcacgccgcatccggcattttgcgcacgaggctggct

SEQ ID NO: 9 - DNA, 221 bp, Escherichia coli
ccttttatactcaaataacaaaaggacagcgcaatgacaacacaatcccaccatgaccacgtagaaaagcagtttagctctcaagccagcgaatatctgaccagtaccgtacatgcatccggacgagatttacagcgcctggcggtgcgtctggctgattatcctgatgcaagtgtacttgatatgggctgcggagcagggcatgccagctttgtcgctgc

SEQ ID NO: 10 - DNA, 7292 bp, Escherichia coli
gaggccatgctgttgattagcatggccttttatatgcttgttttttcggtatgccatccagtatgccattgccgtccggcttgcactggctcacctgaaatagcttcagacaactcactcacctctcatctcgctggcagtgctcccggattggtgtcgggcgatgatgttgttcagcttatcaatcagctcaggtcgcttgaatacgatttgtgcagttcccttctgaaaatacttaatcacaaacatctcatcctcatagtggttgctgtgccggttttcatgaatatggtctcccagccgacgggtaacgtcagcgcggttgtcgggaacaggcttcccgtcaaggatcatcagcattcgctcaaggtctgctaaccggtcacgctgtcagccatggttaagcccgaatccccaccggtcgaatttgaccagtcccgtcacaatgattttcgctccaaacccgcagggcgaattcgtcttaaaattccagcttaatcctttgaaaacgttaatgacgccacgctaaaacacctcacccttgttcaaatgcagttgcttaaaggtgctcagaatattcgcttcgctgaccaccggaatatcatccttttctaggctgttgtaccactggttacgggcctgagcgtccataatcgacagcatccctgagcgtttcattaaatcccgccatttaccgcgatcgagattgcgggtaatggctttcatcgctgtttcaggcttctccataagccagcaaccacagcgaaaatcctgtttcatgacccagtccagggcggtttttccgccgatactgagggtttgtgtcgaaatatcgttaatctggtggagcaatgcttcaatctgtgtcagcgccgcattacgtccggtgacgatgcgttcaatactggtggagcaaatcacatcggtatgatcggttaatacttcggggttggtgagagtaggttctgacattatttatttcctttatacaaagcaaagcgccagccggtgggggctggcacgtgtatgtgtgtaatgagtacggacagggagttaatctgtacgggtcttttgcagacgttgaaactgacacagctcgcgaacgtcctgacatgcacgttcaatccagggaaacagtactgccgaatctgttttatcctcatcgttgtcaaagataattcccgattcgcagtcgatattgttcgtaagcgtaaagccaatgccgtctgtaactcctgatccttgcagactaaattagagctccttctaaattagacggagttctattgatggataaacctacagactggcgctctgggacgcgccggatattttctaatgaatttaagcttcatatggttgaactggcttcgaaaccaaatgccaatgttgcacaactggcccgggaacatggcgttgataacaacctgatttttaaatggctacgtctctggcaaagagaaggacgtatttctcgtagaatgcctccaactattccattacggtaaaatgacactgggaaatccttcaccagagctgctcacggtgttgatccgtgaactgaccgggaggggaagatgatctcactcccatcaggtacccgcatctggctcgtggccggcgttaccgatatgcgtaaatccttcaacggtctgggagaacaggtacaacatgtgctggatgagacccccttctcaggtcacctgtttatctttcgtggccgacggggtgacactgttaaaatactctgggccgatgctgatggtctgtgcctgttcaccaaacgcctggaggaaggccagtttatctggcctgcggtgcgtgacggtaaggtatccattacccgctcgcaactggcaatgctcctcgataagctggactggcgtcagccaaaaacattccgccttaactcactgacaatgttgtaaaaaatgcctggccgcattataaaaacggccatgagtcagaaatacctcattcgcattgcagaactggaaagccagctccgtcagaaagaccagcaactgagtctggttgaagagacgaagaccttcctgcgctctgcactggcacgtgccgaagaaaagatcgaagaagatgaacgggaaatagaacatctgcgggctcagatagaaaaactgcgccggatgctgttcggtacctgttctgaaaaactgcgtcgtgaagttgaacaggctgaggccctgctgaaacaacgcgaacaggacagcgatcgttacagtgggcgggaagacgatccacaggttccccgccagttgcggcagtcgcgccatcgtcgtccgttcccggcacaccttccccgtgaaatacaccgtctggagtctgaagaaagctgttgcccggagtgtggcggtgagctggattatctgggggaagtcagtgcagaacaactggaactggtgagcagcgctctgaaagtgatccgcacagaacgggtaaaaaaagcctgtacaaaatgtgactgcatcgttgaagcaccggcgccgtcccgccgcgatagagcgtggtatcgcgggccccggattacttgcccgcgtgtttacgggaaaatactgcgaacacctgccactgtatcgtcagagtgaaatctttgcccgacagggtgtcgaactgagccgtgcattactctccaactgggttgacgcgtgctgccagttaatgacgccgctgaatgatgccctgtatcgttatgtgatgaatacccgcaagcttcacactgacgacacaccggtaaaggtactggcaccgggcctgaaaaagacgaaaacagggcgcatctggacgtatgtccgggatgatcgcaatgcgggttcgtcatctcctccggcggtctggttcgcgtactcaccgaacaggcaggggaaacacccggagcaacacctccgccccttccggggtatcctgcaggcggatgcgttcacaggttacgacaggctgttcagtgcagaacgcgaaggtggtgcgctgacagaagttgcgtgctgtgctcatgcccggagaaaaatccacgatgtatacatcagcagcaaaagtgcgatggcagaagaagccctgaagcgaatcagtgaactgtacgccatcgaggatgaaatacggggattaccagagtcagagcgtcttgcagtcaggcagcagcgaagcaaagcgttactgacgtcgctgcatgaatggatggtggagaagaatggcacgctgtcgaaaaaatccagactgggcgaagcgttcagctatgtactgaatcagtgggacgccctctgttattaccgtgatgacggtctggcggaggcggacaataacacagcggaaagagcgcttcgtgcagtctgtctcggaaagaaaaattcttatgacctttgtcaaatattaagcccaaaaagaccttacgcagctccgggagcttcgttatatcgcggattaaagaacctgaaacagtcagactgtatcttggattttacaaactcttattcggggattttagccccatgacgatttacgcagtgagctggcctctttctacgtgcaggtattagcgcattctggcttccctgaattcttttacgaggatcactcattccgtgtctgactgcttcagggtttaattttgcttctgctgactgaatgatgattgggcagcaagtgcaatatcccacataaatccagtcaactcacgagccaccgccgtaatggctacttgtgattttttcccttttgctgtcagacttcggtaacgagaacacaatcgttgttgagctttccatgcaatatctttggaatattgtgttacagagtccggtcggtaatatataagccatgccccaacttttgcaggtgtacgataagaccaggcggcttcgtaaagcagacgtctcagttcgctgtttccaacttttgttattcctctgggacgaatactgtttccactggaatattcacctggcaccagtcccagaaaagccatgagctgtttgggattggaaaatcgcgaaaaatcacccagttcagcaaccagagttattgcaattagctgaccaacacctttaagagcctgcaactggcagaccagattgcacagagaccactcaggtaacaggcgagatatttcctggtcgagttgaagtatgcgatcttcaatctgctccagactttgacaatagtgttgaaaagcaatctgttgagatggctgactaaatgattgattagctaaccaggttcgatgttttcctgtccagtgctttcctgcataatgtttgtctgttcgcaatagcatgctcagaattcgctgtcgggcaactctgctgtctcgtttagctgctgcacgggctctgattagatcccgcatagcttcatgagtcaggtcagggatccagacaggggtaagttctccagcccgcagtaacctggcgagagaaattgcgtcccgatgatcatttttgattctgtctgtcggtgattttggtatgcgggaaggggcaataacctggcattttatattcatcgctgtgagttgatgatatagcccaaaaccacaggggccagcctcatagcaggaaagaatgtttccgtaaagtccctgcaatttctgaaataatcgacgtacagcctgggcttcgttgttaatcgtaccataataacgaacttcgccaagccgttcaggtgcagcaatagcaaccgccaacgtttctttatgcacatccagcccgacgtaagccgcaatattttccgaatgcatgatgacctcctctggaatatcccaccaatgctatagtgagtatataaaggtcatatcatctacgtgttcttcggtagcgatcacggcggcgagcgtggagcactgctgtacgggctgatcggcacctgccgtctgaacggtatcgatccggaagcgtatctgcgccatattctgagcgtactgccggaatggccctccaaccgtgttgacgaactcctgccatggaacgtagttctcaccaataaataagcgtcaatacggtgctccgttgacgcttactattgttctgcagctaaatagctgcgcggaatagtagatcactttgagggaactcagcccggattgtgcgatctgatcaatcgccaaatcaaaacaaatcaccaaccggactgagcaatgccgatcatagcaccaatttcccgtgacgaacgacgcctgatgcagaaagccatccataaaacacacgataaaaattatgcccgcagactgactgccatgctgatgctgcaccggggcgaccgtgtcagcgacgttgccagaacgctctgctgcgcccgttcctctgttggacgctggattaactggttcacgcagtcgggtgttgagggactgaaatcattacctgccgggcgtgcccgtcgctggccgtttgagcatatctgcacactgttacgtgagctggtaaaacattctcccggcgactttggctaccagcgttcacgctggagtacagaactgctggcaataaaaatcaatgagataaccggttgccagttaaatgccggaaccgttcgccgctggttgccgtctgcggggattgtgtggcgaagggctgcgccaactctgcgtatccgtgacccgcataaagatgaaaagatggcagcaatccataaagcactggacgaatgctgcgcagagcatccggtcttttatgaagatgaagtggatatccatcttaatcccaaaatcggtgcggactggcaactgcgcggacagcaaaaacgggtggtcacgccgggacaggtaaagccagctatgtgggcggcaacagcaaaagttcggcgctgttcatcagcctgctgaaacggcttaaagcgacataccgtcgggcgaaaaccatcacgctgatcgtggacaactacattatccacaaaagccgggaaacacagagctggctgaaggagaacccgaagttcagggtcatttatcagccggtttactcgccatgggtgaatcatgttgaacggctatggcaggcacttcacgacacaataacgcgtaatcatcagtgccgctcaatgtggcaactgttgaaaaaagttcgccattttatggaaaccgttagcccattccccggaggcaaacatgggctggcaaaagtgtagcggtattaagcgcagctatttaggcaatcagaatttccagcgccgtttccgtgattaatgatgtcatgtcgttcctagttaccagtcgaaagtgggcaggcccggcagacatcctgcactggcagccagatgaatgagaccgacgccataacaccggatgagagtgacaaccagacgacggaacgtttttgacaggccaagacgtttaagccgcagaaccggatacgaccacgcatcagtacgtaacagataaccggtacctgtaaaatgaatccattctgattcgccgaagtcattcgtctgatgtgacagtgagtacagccaggcgttgtccttttccgtgatatgtgcggtactgcaacgaacgtatgtcggtaagggcagtaaacggtggtggagagtcggttgtctgctgttcgggagcatccaccacgcggagtgaataaccgttttcagcgaccttattattcaactcagcggggtcaataccatcgacgtcaacgacaattcgccccatgttcagtgcctgcacgttaacgctgtctgcttcgagcgtcagagtctatgagacgacaataactcagtccgcctggcgccgattattctggccggttttgtaacctgagtgtcatttacatgatccaacaggaaatggcgtgacgctcaatacttctcaggtcagttactatatgactcagcgtaagaaaggtataactcagcatatctcggccatgaaggctggtatctcagtccgttctggtcgtcggatcgaaaaaggagagtgggcaaaaaacagtgttcggcactggcgcacacgcaaagatcctctggaagctgtgtgggacagcatgcttgttcctctgttgaaagagaggccggctctgacaccaacaactctgctggagatgctacaggataaatatcccggccagtaccccaacagccttcgaagaacaatgcaacggcgggtccgcgaatggaagctacagtatggtgcagagcaggaggtcatgttccgccagmgacatcagcccggtctgcgaggtctgtcgsacttyactgaactgaaaggtgtagttgtcaccatcgccggtaagttgttggcgcataagttgtatcacttccgtctggaatggagccactggagctggatgcgg

SEQ ID NO: 11 - DNA, 23654 bp, Escherichia coli
  misc_feature (12189)..(12189)
  misc_feature (12189)..(12189): Unsure
accgccccgggtttcctggagagtgttttatctgtgaactcaggctgccagatcatcgtttccgatggaagcataataagctttttctgcttctgccggaggagtatggcccagcctttccagcaatcgtcgattgttataccagtccacccacgtgagtgtggccagttccacttctgcacggtttttccagctcttacggtgtattacctccgctttgtaaagaccattgatgctctccgccatcgcgttgtcatacgagtcgcctgtacttcctgttgatgccagtaatccggcttccttaagccgctgtgtgtaggccagcgatacatactgagaacctttatcactgtgatggaccgtgccggacggtcgacgggcccataacgcctgctccagtgcatccagcacgaatgtcgtttccatggacgatgagacccgccaccccacgatgtatccggcaaacacatcaatgatgaacgccacatagacgaagccccgccatgtgctgacgtaagtaaaatcagccacccacagctggtcaggtcgttctgccacgaactgacggtttacgcggtcgcctgcggcaacggctttccggctgatggtcgtacggacctttttaccccggagaacaccggcaagtcccataaccgccatgagacgtgccacagtgcatctggccactctgataccttcccgtaacaactgacgccagactttacgcacaccgtataccttgtgattttcatcgtatacgcgctgtatctctttcttcagccagtcatcgcgctgcgcacgggcactgcgtttatccggatgatgtcgctgttgctgacagtggtaatacgttgacggggcaatatgcagttcgctgcatagcggtccgaccccgtactgctcacgcagcttatccagcagtggcatcattttttccagaggcggtcgaactccgccttcgcaaaataagcggaagcctggcgaaggatatcgttactgcggcgcagttcacgattttcacgttccagctctttcagacgctgacgttcagcggtggtgagccctccatcaccgcccccggtatcccgctcatgctggcgaacccagacacgcagagtctccggcgtacagccaatctttggagcaatggaacaaattgtcgcccattgtgagtcatattcgctctgactttccagaaccatacggactgcccgttgacggacttcgggggaaaaacgagtatttttagtcatcctgtttacctctttctcaggaagtttagtctccaggattcccggggcggttcaaaccgactggcagggcgctgtcaggggcgtacatcaggacagagtgagccagcagcccgcgcgtcttcgggttagtggtggtattcccctggtcatcagatgccgtactgtggctgaagttaatggtggtggtgtcttccagtgcgaggagcagcggatgagcctcacatgcccttacagtggcggtaaatccggcttcggcaatggcttgcggggacacagacgggttacgtatcaggcggtacgcaccttcaacctgagcagtggactgggatgatttcacaatagaaagacctgcatgctgagcgagagaagaggtcagtgacacaaggcgtcgtgtacgacgcggatcaccgagacgggcatgtccagactgctcgttatcccatgaataacaatcagaaagtaccataacagacccgaagaaaatgaaatataagaaaagatcaacgagtgaagaaaaagttcaaaaaatggctgccggggaggaaggaaagtaccggatggaaagagtcccccctaaagcagactgacagacataacaaatccccggggggatttgtgtataagagacagtacttatctggaggtaattgcaatatctctgtgaacttacacagggtgggcttaccgcatacactgacacttagcggatcgacagaacattattaacagagcatcactgaacgctacataatcagagttgcataaataaaatgttatgatataacatcacaatcacaacatttgttttcgaatgtatatgaatgtaatcagaactgtcatttgtacattaattatacttccggtgggattacaggcagcgaccagtcattcttctatggttaaagatacaatcaccattgtcgcgacaggaaatcagaacacggtatttgaaacgccgtcgatggtcagtgtcgtcacgaatgacacaccgtggagtcagaatgcggttacatcggccggcatgctgaaaggtgttgccggtctcagccagactggtgcaggacggaccaatgggcagacctttaatttacgcggctatgacaaaagcggggtacttgttcttgttgacggcgttcgccaactcagtgacatggcaaaaagcagtggcacttatctggatccggcactcgtcaaacgtatcgaagttgtccgcgggccaaactccagtctgtacggcagtggcgggctgggaggtgtagtggacttcagaactgccgatgcagcagattttcttccccccggagagacaaacggtttaagtctgtggggaaatatcgccagtggtgaccacagcacaggctcggggctcacctggtttggtaaaactggaaaaacagatgcgctcctttctgtcattatgcgtaaaagaggtaatatctatcaaagtgatggtgagcacgcacctaacaaggaaaaacctgcagccctgtttgcgaaaggctctgtcggtataacagacagtaacaaagcaggtgccagcttgcgtctctaccggaataacaccactgaaccgggcaattccactcagacacatggtgacagcggcctgcgtgacagaaaaacagtacaaaatgacgtacagttctggtaccagtacgctcctgtggataacagcctcatcaatgtaaagtcaacgttatatctcagtgatatcactatcaagacaaacggtcacaacaaaacggcagaatggagaaacaacagaacctccggtgttaatgttgtcaacaggagtcatactctgatttttccgggagcccatcagttaagttatggcgctgaatattaccgtcagcagcagaagccagaaggctctgccacactatatccggaaggaaacattgactttacatcgttgtatttccaggatgaaatgacaatgaaaagctacccggttaacattatcgtcggttcccgctatgaccggtacaagagcttcaatccccgtgccggagaactgaaagccgaacgcctgtccccaagggcggcgatttcagtctcaccgacagactggctgatgatgtacggctccatatcctctgcattccgagcgcccacaatggcagaaatgtacagggatgatgtacatttttaccgcaagggtaaacccaattactgggttcctaaccttaatctgaaaccagaaaataacatcacccgtgagattggcgcaggtattcaactggatggcctgcttacagacaatgaccggctgcagttaaaaggcggatatttcggaacggatgccagaaactatattgccacacgcgtggatatgaaacggatgcgttcttattcttataatgtatcccgggcccgtatctggggatgggatatgcagggtaattaccagtctgattatgttgactggatgctttcttataaccggacggaaagtatggatgccagcagcagggaatggctgggctccggcaatcctgacacacttatcagtgacatcagcatacctgttggtcatagaggcgtttatgccggatggcgtgctgaactttcagcatcagccacgcatgtgaaaaaaggcgatccccatcaggctggttataccatacattccttttcactgtcttataagcctgtaagtgttaaaggctttgaggcgtcagtaactctggataatgccttcaacaagcttgccatgaatggcaaaggtgtgccgctttcaggcagaactgtcagtctttatacccgttatcagtggtaacctcgcaggaaataaatcatgatgaaaaatacaggctatatcttagctctttgtctgacagcatcggggcatgtcctagcccatgatgtctggattacaggtaaacaggcagagaacaacgttaccgcagagattggttatggtcataatttcccctcaaaggggacaattcctgacagaagggatttctttgaaaatccccggctttataacgggaaagagacaataacactgaagccagcgtccacggattatgtctataaaactgagtctgcaagcaaagataatggttacgttctgtcaacgtatatgaaaccgggatactggtcgagaacctcgtcaggatggaaaccggtcagccgggagggcagaaatgatgtggcttactgtgaatttgtcactaaatatgcaaaatcttttattcctggtgaacagcagatgccagcacaactctatcagtctccaacagggcatgagcttgaaatcattccgttatccgatataagtcgtttcagtgaaaatgtgaagctgaaagttctgtataaaacgtccccgctcgccggagctatcatggagcttgactcggtcagttatctgacatcatcccgtcatactcatgcagttgagcacaaacatcctgttcataaagcagaactcacctttgtaactaatgaggatggtatcgtcacagtaccttctcttcatatcggacagtggctggcgaaagtccaaaataagaaaagttttcaggacaaaagcctgtgtgatgaaactgtcgatgtggcaaccttaagcttctcccgaaattaatgatactattcctgccctgtattttacgggcagggtatatcaaccggaaatagcctactgacatccatgtaaaaaaactcataattattttgttgatgtatcttacctaatacattgatagctccagtttttataccagagcattctcgttgtccctatgtacttgtctgcaatatcactgatatgcaggaataatattcttggcatggagtcagttccccgtcatcttaggtatcactttaactcacaggtgtccagtaaatatgaacaggatcccagtaatcattatcaatggtttccttggcgcaggaaaaaccactcttatgaaaaacctgctcacacaggcaaacaggaatcacttagctgtatctgtcattgtcaatgatatgagcgatctggatgttgatggtgtacttattgcaaatacagaaatcgttaatattgcgaacaataatttcgtgagtatcacatctgatagtatcagcagccagagtgggattaagacggtcgacaaggcaattaaaaatatgctcaggcattatttgcctgacgttatatttgtcgaaacatccggaggtagccacccactgccattaattaagtatctgcagactcatgagcgattacagctaaaatcacttttatcacttgtcgataccgttatgctcaatgatgactataacggagggaaagcactgatacctgcatttcaggagaatcttttccatggcaagcgcagaatagagaatttactggctgagcaaatcatgttttgtagcactttgctgttaaccaaaaaggatcgactgtcattcgacattgtcaccgatgtggcgaaagcaatccatcctctgaatccttacgtaaatgtgatagctgtgtcatgggggaaccttaaactagcagagttactaacccttccggattacgattttaaccgggtcggattacttatcagagaactggaagacacaatcacagtagaagaagcaaaaatttcagcccaaaatggcgaaataatttcgcgagtgattaaagatgacaggccattccacccacaaagattatgggaaacctatcattattttatgggaatgggtatttatcgtagtaaaggctttttctggctaccaggaagacctgacatggctctgctctggaaccaggccgcaggaagtatcaatctggagtttatcagctactggaattccggtgtattggcagaccctgataatcacctgacccacgaagagcgctctgttttgcagaaaaaagtcaataaaactatggggcggtttggagacaggagatgccatttaacgattatagggcgttctgatgaagtccatgattttacctccgccttaattaactgttttctttctgaagaagaaattgtctggtggcaatcaggtggcgttttcgcggatccctggcccgttaatatatcccggctgaactgatgattaacgcgatattgcaaatatggcatatgaatcgatcgtagtttggcattcgaatcgatcatgatttgggtaaacgttcacggagcgccgtattgacgtttatttattgggtgagtacgacgttccatggcaggagttcatcaacacggttagaaggccattccggcaggacgttgaggatatggcgcagatacgattccggatcgataccgttcagtcggcaggcgccgatcagcccgtacagcagcgcactacgctctccaccgtgatcgttgccgaagaacatgtagatgatatgacctttatatactcactatagcattggtgggatattccagaggaggtcatcatgtattcggaaaatattgcggcttacgtcgggctggatgtgcataaagccccctagcagttgctattgttgcatctgaacgacttggcaaggttcgttattatggtatggtacgattaacaacgaagcccagtctgtacgtcgattatttcagaaattgcagggactttacggaaacattctttcctgctatgaagctggcccctgtggttttgggctatatcatcaactcacagcgatgaatataaaatgctaggttattgcctcttcccagatagtaaaatcaccgatagacaggatcaaaaatgatcatcgggatgcaaccgctaccgtttgcctcgttctggaaataaccttgctgatgggggtatggtttggtacgttgtggggatttgtatgtggttttcttcatggaaagacagtggtatgcaaccgggcgttgcatttgtctcaagcatagtcgcaggcatttgctttggtgttctcatggctgtgtaccattagtgtcgaaaggtagttaacaatcttccagactgggacagtctggagtaaagatcgttgtagaggctatatactttttaaatggactgggggtgagatgggaaaaataaaatattggctaatagtaggatttattatactttttgcgattttttacattgctattagtgacagggattctacgctttctaggttgaaatcagcaggtgaaaacggagatgtagaagctcagtatgctttggggctcatgtatttgtatggagaaattctggatgttgattatcagcaggcaaagatttggtatgaaaaagccgctgaccaaaatgatccgcgtgcgcaggccaaactcggtgtgatgtatgcaaatggtctcggggtaaatcaggattatcagcaatcaaaattatggtatgaaaaggcggctgcgcaaaatgatgttgatgcgcaatttttgcttggggagatgtatgacgatggtctcggggtaagccaagactaccagcatgcaaagatgtggtatgaaaaagcggctgctcaaaatgatgagcgtgctcaggtcaatctcgctgttctatacgcaaagggtaatggtgttgaacaggattatcgacaggccaaaagctggtatgaaaaggctgcagctcaaaatagtcctgatgcgcagttcgctcttggaattctgtatgccaatgctaatggtgtagagcaggactatcagcaggcaaaagactggtatgagaaagcagcagaacaaaatttcgccaatgctcagtttaatcttggtatgctctattacaaaggtgagggtgttaaacaaaactttcggcaagccagagaatggtttgaaaaagccgcatctcaaaatcagccgaatgcccaatataatttaggtcagatttattactacggtcagggtgtgactcagagctatcgacaggcgaaagactggtttgaaaaagcggcagagaaaggtcatgtcgatgctcaatataatctcggtgtaatatacgaaaatggtgaaggtgtgagtcagaactatcaacaggcaaaggcttggtatgaaaaggcagcctcacaaaatgatgcgcaggcgcagttcgaacttggcgttatgaatgaactgggtcagggtgaaagcatagacctgaaacaagcaagacattactatgagcggtcatgtaataatgggcttaagaaaggttgtgaacggttaaaagagttattatacaaatagatattataatatttattatatgaggttgtgaattaatggcaatccctgaacgtatgatccccgtaaaagtcagcagcaaaaaaataagagaattagcacagaaagctaaagagatacttgcagctattgatagtggagcaagtgaagaagatgcttttttaaaggacatgatcgatgactggaacagtcaggtagtatgtccatgtgagttttcagattttagagattattcctcttggacaaatgcaaatgaatttacacgaatagcttttaatttggaaaagttctacgaggattttacttgggaggaactggttcaaacgataagctgtgtatgtgatcaaaagtcaaacgaatcggaaaaaatttttgctcttttgttgcttgaaaagaattttcatggaaatccatccgatcttatattctggcccgatgaatggtttcaggatccagatatgttagatgttgaactgagtgttgaagagattgcatgctatttgatggttcgatccggtaggcaactagttgatgcacctgaaatcgacctgaaatatcaaataccccagtctgacgaataaaaaattaatataagtgtagataaatagttatgagcaattacaggaaaaacaagtgtgaaaaaaactgatattgccctgtaaatttaattaattataatgtcccacacttacatggtggagaatatcattgggggcggagtaagaataaaagagttaattctgagcatccatacattttacctatgtcaggtaaaataaactatgggcttgattattcaccattattcatgtttctactaagaaaaacaggtgaaaaatcggatcaagtttatagtgaagcgattctacgactcgatctgcctgatccaaccttctttctagttgctctacacgaaacagaccaaagaaattttgttcggtgcggcaaatccagttattacaatgggctgtatgttgatgagaatggttacttgaaatgttttctccagatttaaaggcatcaggcataccaatattatgtaagtgctgtacttacactctaaacgggaaattattaaatgaataagttgaaatttttctgaccttattaacttaaagaatagacgcatcaattgttttatttcagggcgttaaacacattgtatttataattatgcaaaatttaccaatgttttaacagatccgatagtagctattgttgttttcggagtttggccctgagctgtccatgcctttttagaattatcagtatcaatagatggtaatacctccaattagttgaattaggggtataatagtcgcttttaaggttcttccatggtcacagttaaccttcattgtccctgttgccagcccgttcaggtttaccgtccaatagagttatacttagctgaacctagatttttagcttcgggtatttaaaaataggtattaagaagattgctaactttattgataataacttaaactgtttttagggagcataattaaatgtaattttaggtttgtaatttattatgtttttttgatatgcaaaaatataatgcgagtagaggtacgataaataatatacaaaacattaatacgaataagaataaattccttgatgatccagtatcactaaaaaatctatcccaggatttctttggtattatcttttgcgctgatatttctaaagcataatatgcaaacgggtatgctacagcaccaatagcaaggtatgctgcaacataaggtatataaggaatataagaaggaaatatctttccatcctttaaatcagtcaaaatgttgtaaaccaaagagccacaaccgactaagccccataaacaatgtctgagatagtatctaaatgtcatattatataccttaatgatatgaaatagggtacatatggattcaagtaggcagtttccgcaaactgaaagccattaactctgataggccgctatgagtgggccatttgggttttgcccatgatcacagtcatagttctggaaaatggctgtgctctttaaataaatgtctttaactcctcagtgtttatattcgccagcattgaagcctttaaatgtgggaatgtacgaggtatctggaaatcagtttaaaacctttggtatattccagccatcttggcaagtccccggttccgaacaaccaagcgttacaatcgtaatcagtactataccagttttcaagcaaatgcagcctgtacggttgaacaatatctgatgtgagtttttctctggggtcaggttcaccagcaaaaagctcaagcgaaaagtgccctgcaagcccttcagagactatgacttctcctaaagttgagccgtatctcggcccatctaacagcacgatgcagttcatgtgcaaacattcgagcaatggagtgcgcataatttttgcaaaattatggattttctggagctactgttctatagacaactccagcttcagggtaaaaaccatgatgccctttctccgggaggacaagtttccctactttaaccaccacgtccagtgaaggaatcggcattaaccttttaactagttcgtaggtatcagtcaggttgatttgaagccattcatagtgagcagtgagtttcttttgggtattaagaaaatagaggggcatttgagacataacggtaccactcaaaagagtcagtaaatcgctacatgttaacacacaacgtaaatgttgtggtgtaagcacagtagtagaggaccagactgttacccatcatacctgctcttagggcagagcaaacccaaaccatcaaaatagctctggcttttgtgtcatagctgtctcaggttaagtctgagctaatatattaattaaaacagtccattcgccatgtattattaaatagttagttaccatttgataattaatatgaaattacttcacaggaatctctctattattatttattcgtttttatccttcaggtaataggtcttcatataggtcaagcgatgaccattaaacatatagcctgggttaataaagtaatagttctgtatcatggtctctgcaataaacttcttgtcagcaagttctttcatgcctttgaaatattttttctggatctttttacaacatcttgatcgacaatattccatatagctggaaaaattttcgctgataaaacggttgaaaagtgcgcccaaaatgtactgtttaaaatcccatccgtcgacagaccctctgacatcattgaccatttgccctatcaggtgttgcagccctgctcgttattgaatgcctgtcatttttaattcgttttcctggttcaggtatgaatcatcaggggctattctacagcaaacgcgtggctcaggtagcccgtaagtaagtcggtggactccgggttattcatggcagggaggcgtggccgaatacttctctcctttgctgtatgtctggcacatcctaaataatttcagacagatattatctccgtgaatcccccgccacctttccggtgcgcggggttttgtctttttttaccgggaatacatgtatgaatccgtctgatgccattgaggcaattgaaaaaccgctctcctccctgccttattcactttcccgtcacatcctggaacatctgcgcaaactcaccagccacgaacccgtgattggcattatggggaaaagcggggccggtaaatcctcactctgtaatgcactgtttcagggggaggtcaccccggtcagtgatgttcacgctggcacccgggaagtgcggcgcttccgtctgagtggccacnggtcacagcatggttatyactgacctgcccggggtgggcgagagccgggacagggatgcagagtatgaagccctgtaccgtgacattctgccagaactggacctggtactgtggctgattaaagccgatgaccgtgccctgtctgtggatgagtatttctggcgacacatcctgcaccggggacatcagcgggtactgtttgtggtgacgcaggccgataaaacggagccctgccatgaatgggatatggccggtattaagccttctcccgcacaggcacagaatattcgcgaaaaaacggaggcgctattccgtctgttccggcccgtacatccggttgttgccgtatcggcccgcaccggctgggagctggatacgctggtcagtgcgctcatgacagcgcttcccgaccatgccgccagtcccctgatgacccgcctgcaggacgggctgcgcacggagtctgtccgctctcaggcccgtgaacagtttaccggtgcggtggaccggatatttgacacagcggagagcgtctgtgttgcctctgttgtccgtacggccctgcgcgctgttcgtgacaccgtggtctctgttgcccgcgcggtatggaactggattttcttctgaacctgttgtagatgatgccctccctgcctctgagccatctcacaaaaagcgcggttttcattgccacctttcttgtccgtgcaacaatcaggtaatagaataaaacgatcgataactatttaatcgatcgtttatatcgatcgttatgctaataataacacccgttagcaatgtatgcagacacacagacatgagattcagggaacaacagagccacacgtcagaaacttccatcagccggatctgcggcactgtaacccttcacctgcaggtatccacatttgtggataccggctttttattcaccctcactctgataaggaaatgctgatgaaacgacatctgaataccagctacaggctggtatggaatcacattacaggcgctttcgtggttgcctccgaactggcccgtgcacgggggaaacgcgccggtgtggcggttgcactgtctcttgccgctgccacgtcactcccggcgctggctgctgactctgttgtaccggcaggagaaaccgtgaacggtggaacgctgataaatcacgaccgccagtttgtctcaggtacggctgatggaatgactgtcagcaccggactggagctgggggcggactctgataacaacaccggcggtcagcagatagcccggggtggaacagccagaaacaccagagtcaccgcaaacggtctacaggatgtcatggcaggtggcagtacctcggatacggttatcagtaccgggggagggcagaatttgcgtgggaaggcttccggtactgtccttaacggcggtgatcaatggatacatgcaggcggcagggcatccggaacggtgattaaccaggatggttaccagaccattaaacatggcggactggtaaccggaaccatcgtcaacaccggtgcagaaggtggtccggattctgaaaatgtgtccaccggtcagatggtcggggggattgctgaatccaccaccataaacaaaaatggccggcaggttatctggtcttcggggatagcccgggacactctcatttacacaggaggtgaccagacggtacacggagaggcacataacacccgactggagggagggaaccagtatgtgcacaagtatggacttgcactgaacacggtaattaacgaggggggctggcaggttgttaaggccggtggtactgccggtaacaccaccataaatcagaacggcgagctgagggttcatgccggcggtgaagcgtctgatgtcacccagaacacgggaggtgcactggttaccagcactgctgcaactgtcaccggtacaaaccgcctgggagcattctctgttgtggagggtaaagctgataatgtcgtactggaaaatggcggacgtctggatgtgctgagcggacacacagccaccagaacccttgtggatgatggcggaacgctggatgtccgcaacggtggtaccgccactgccgtatccatgggaaatggcggggtactgctggccgattccggggccgctgtcagtggtacccggagcgacggaacggcattccgtatcgggggcggtcaggcggatgccctgatgctggaaaaaggcagttcattcacgctgaacgccggtgatacggccacggataccacggtaaatggcggactgttcactgccagagggggctcgctggcgggcaccaccacgctgaataacggtgccacgtttacccttgccgggaagacggtgaacaacgataccctgaccatccgtgaaggtgatgcactcctgcagggaggcgctctcaccggtaacggcagggtggaaaaatcaggaagtggcacactcactgtcagcaacaccacactcacccagaaagccgtcaacctgaatgaaggcacgctgacgctgaacgacagtaccgtcaccacggatatcatcgctcatcgcggcacggccctgaagctgaccggcagcacagtgctgaacggtgccattgaccccacgaatgtcaccctgacatccggtgccacctggaatatccccgataacgccacggttcagtcggtggtggatgacctcagccatgccggacagattcatttcacctccgcccgcacagggaagttcgttccgacaactctgcaggtgaaaaacctgaacgggcagaatggcaccatcagcctgcgtgtacgcccggatatggcgcagaacaatgctgacagactggtcattgacggtggcagagcaaccggaaaaaccatcctgaatctggtgaacgccggcaacagtggtacgggtctggcgaccaccggtaagggtattcaggtggttgaggccattaacggtgccaccacggaggaaggggcttttgtccaggggaatatgctgcaggccggggcctttaactacaccctcaaccgggacagtgatgagagctggtatctgcgcagtgaagaacgttatcgtgctgaagtccccctgtacgcctccatgctgacacaggcaatggactatgaccggattctggcaggctcccgcagccatcagaccggtgtaaacggtgaaaataacagcgtccgtctcagcattcagggcggccatctcggtcacgataacaacggcggtattgcccgtggggccacgccggaaagcagcggcagctatggcttcgtccgtctggagggtgacctgctcagaacagaggtcgccggtatgtcactgacgacaggagtgtatggtgctgcaggccattcttccgttgatgttaaggatgatgacggctcccgcgccggcacggtccgggatgatgccggcagcctgggcggatatatgaacctgacacacacctcctccggcctgtgggctgacattgtggcacagggaacccgccacagcatgaaagcgtcatcggacaataacgacttccgcgcacggggccggggctggctgggctcactggaaaccggtctgcccttcagtatcactgacaacctgatgctggagccacggctgcagtacacctggcaggggctttcgctggatgacggtaaggacaacgccggttatgtgaagttcgggcatggcagtgcacagcatgtgcgtgccggtttccgtctgggcagccacaacgatatgacctttggtgaaggcacctcatcccgtgcccccctgcgtgacagtgcaaaacacagtgtgcgtgaactgccggtgaactggtgggtacagccttccgttatccgcaccttcagctcccggggtgatatgcgtgtggggacctccaccgcaggcagcgggatgacgttctctccctcacagaatggcacttcactggatctgcaggccggactggaagcccgtgtccgggaaaatatcaccctgggcgttcaggccggttatgcccacagcatcaacggcagcagcgctgaaggttataacagtcaggccacactgaatgtgaccttctgataattctgcattgcctctctgtggtcccggtcatcatgaccgggacccggacgggggaaaacgtttcagtgccacattcactgacattcacaataacatgatattcatcacggagtgactatgttacagatagtcggcgcgctgattctgctgatcgcaggatttgccattcttcgccttttgttcagagcattaaccagcacagcgtctgcgctggcagggttcatattgctgtgtctgttcggtccggctttactggctggctatatcactgaacgcataacccggttattccatattcgctggctggcaggcgtatttctgacgattgccggaatgatcatcagcttcatgtggggacttgatggtaaacatatcgcactggaggctcatacttttgactctgtaaaatttattctgaccaccgctctcgccgctggtctgctggctcttcccgtgcagataagaaccattcagcagaacgggctcacacctgaagatatcagcaaggaaattaacgggtattactgctgtttttatactgcttttttcctgatggcgtgttctgcatacgcaccattgatcgcattgcagttcgatatttcaccctcactgatgtggtggggcgggttgttgtactggctggctgcattagtgacgctgctatgggcggccagccagatccaggcgctgaaaagactgaccagtgccatcagccagacactggaagaacaaccggtgctcaacagtaaatcgtggctgagcagtttgcaaaacgattacagccttcctgaaacgctgacggagcgcatctggctgacactcatttcacaacggatttcccggggagaactgagggaatttgaactggcagacggaaactggctactggacaatgcctggtatgaaagaaacatggcgggtttcaacgaaaagctgagagagagcctgtcatttacccctgatgaactgaaaaccctcttccggaaccgcctgaatttatcaccggaagcgaatgacgattttctcgatcgttgcctggacggcggtgactggtaccccttttcagaaggccgccgttttgtatcattccaccacgtggatgagcttcgtatctgtgcctcctgcgggctgacagaagtacatcatgccccggaaaatcataagccggatccggaatggtactgctcctctctttgtcgcgaaacagaaacactgtgtcaggacatttatgaacgttctcacaccggttttatttccgatgcaacggcgaatggtctgattctcatgaaactgccggaaacctggagtacaaatgagaaaatgtttgcttccggagggcagggacatgggtttgccgctgaacggggaaaccatattgtcgacagagtccgtctgaaaaacgcacggatcctcggtgataataatgccagaaatggagcagacagactggtcagcggaacagaaatccagacgaaatattgttcaactgcagcccgtagcgtcggtgcggcattcgacggacagaacggacagtatcgttacatgggaaatcatggtcccatgcaactggaagtcccccgtgatcagtatgccggcgctgtggaaaccatgaagaataagatccgcgaaggtaaagtacccggtgtaaccgatcccgaagaagcgtcccggctgattcgtcggggacatctgacttatacccaggcccgtaatatcacccggttcgggaccatcgaatcggtcacttatgatattgccgaggggtcggttgtcagtctggcggccggagggatcagttttgccctgacggcatcggtcttctggctcagcaccggcgatcgcgatgctgccctgcagacagctgctgtccaggcaggaaaaaccttcacccgcacactggctgtctacgtcacaacccagcaacttcaccggctcagtgttgttcagggtatgctgaagcatattgatttttcgacggccagcccgactgtccggcaggcgcttcagaaggggaccggtgcaggaaatatcagtgccctgaacaaagtgatgaagggttcgctggtgacatctctggcactggtagctgtcacaaccggccctgacatgatcaaaatgttgcggggacggatctccggtgcgcagttcatcaggaatcttgccgtggcatcttcctgtgtggcaggtggtgctgtcaggtcagtggcgggcgggatattgttcagtccactgggaccatttggtgcactgacagggcgtgtggttggcggtgttctggggggaatgattgcctccgctgtatcaggaaaaattgccggagcgctggttgaagaagatcgcgtcaaaattctggcaatgattcaggagcagatgacatggcttgccggcagtttcctgcagaccggacatgagattgaaaatctgaacgcgaatctggcccgtgttatcgatcagaatgctctggagatcattttcgccgccggtatacaacaacgggccgcgaccaacatgttaatcaaaccactggtggtcagtatcatcaggcaacgccccgtcatggaatatgatgcatcccatctcggcaatatggttaaccgactggaagaaacattacccccggagttaccggcataacggctattctgcgccttttacgttttatcacctgatttgtcagtgtcatcgtcatgactcagagaggtaaataccatgattcacctgttcaaaacctgcatgattaccgccttcattctggggttaacgtggtctgccccactccgggcacaggatcaacgttacatcagtatacgcaatacagatacgatatggctcccgggaaatatttgtgcttaccagttccggctggataatggcggaaacgatgaaggatttggccccctcaccatcactctgcaactcaaagacaaatatggtcagacgctggtgaccagaaaaatggaaacggaagcctttggtgacagtaatgccacgcgaaccacagacgcatttctggaaacggagtgcgtggaaaatgtcgccacaaccgaaatcattaaagcaactgaagaaagtaacggccatcgtgtcagtctgccgttatcggttttcgatccccaggactaccatccactgctgattaccgtttccggaaaaaatgttaactgatccctgaagtcagtttcatgcttcagcctctgccacaacgtatggcagaggctatttatcaggagaaaccagatatgccgggttacacacagagtatgtcctggctgaaggatctttctcatacgggcaggcggttgctgtcataaccgcttaccacaatgtgtttatccaggatgacccgggaatgcatttccgtcgggttatccgcaacgcggaaggtcagcgacgctgacgcagccggaactctgaagctgatgccggaaaacagcttaatgcgtggctcgccagtggagggcttctcagacaataaacctcattgatttcatccatcaggccgcgtcttctccgggagacgcggcttttttcatttattgcaccagtaaatcttaaccaccgataaggagcaaagtatgcgattagccagtcgttttggttatactgcaaaccagatacgtcgtgaccgtccactgacacatgaagagctgatgcaccatgtgccggggattttcggggaagagaaacacacgtcccgaagccagaactatacgtacatccccaccatcaccgtactggaaagcctgcagcgggaaggctttcagccattcttcgcctgccagacccgtgtgcgcgacccgggccgccggggatacaccaaacacatgctgcgtctgcggcgggccggagagataaacggagagcatgtccctgaaattattctgctcaactctcatgacggtacctccagctaccagatgctgccgggttacttcaggttcgtctgccagaacggctgcgtctgtggtcagtctctgggggaagtgcgtgttccacaccggggagacgtagtggagaaagttattgaaggggcttacgaggtggtgggcgtgtttgaccggatagaggagaagcgtgatgccatgcagtcgctggtcctgccgccaccggcacgccaggcgctggcacaggcggcactgacttaccgttatggtgacgaacatcagcccgtcaccaccgccgacattctgacgccacgacgccgggaggattacggtaaggacctgtggagtgcttatcagaccatccaggagaatatgctgaaaggcgggatttccggtcgcagtgcaaaaggaaaacgtatccatacccgggccattcacagcattgataccgacattaagctcaaccgtgcattgtgggtgatggcagaaacgatgctggagagcctgcgctgatgcaatctgtccctgaaggcgtgattcaggcaccagaatcacccgacgccccggagagctcagtctgtgcagactgagtacaggcaatggcatctggccatccgtctgtgaccggaacggttacgcgtacggctgtccggaatttcagccgaatatcattcatccctgacattaccgggtctcacggtcagtgatgaacgtgatgttgtcagcccccggcctttactccctctcatttattcacattacaaggatttcatacatgaaaacattgtctcagaacaccacctcttcggcctgtgcaccggagactggcctgcaacaactggttgccaccatagtccctgatgaacagcgcatcagcttctggccgcagcattttggcctcattccacagtgggtgaccctggagccccgggtcttcggctggatggaccgtctgtatgaagactactgcggtggtatctggaatctgtacaccctgaacaacggtggcgcatttatggcacccgaaccggatgacgatgatgacgaaacatgggtgctgtttaacgtcatgaacggtaaccgcgctgaaatgagcccggaagccgccggcattgccgcctgtctgatgacgtacagtcatcacgcctgccgtacggagtgttatgccatgacggttcattattaccgtctgcgggattacgccctgcagcatccggaatgcagcgccattatgcgcattattgactgaaagggggcaggaacaatgcaacagatttcctttctgcccggagaaatgacgcccggcgagcgcagtctcattctgcgggccctgaaaaccctggaccgccatcttcatgaacccggcgtggccttcacctccacccgtgcggcacgggaatggctgattctgaacatggcgggactggagcgtgaagagttccgggtgctgtatctgaataaccagaatcagctgattgccggtgaaaccctcttcaccggcaccatcaaccgcacggaagtccatccccgggaagtgattaaacgcgccctgtatcacaatgccgcwgccgtggtrctggcacacaatcacccgtccggtgaagtcacmcccagtaaggcagaccggcttatacggaacgtctggtacaggcactgggcctggtggatatccgggtgccggaccatctgatagtcggtggcagccaggttttctcctttgccgaacatggtctgctttaacccgtcacaaccacatcacacctgttttcacttttatcttctgtcttcagaggtatcccattatgaaaatcatcacccgtggtgaagccatgcgtattcaccaacagcatcctgcatcccgtctttttccgttctgtaccggcaaataccgctggcacggcagcactgaagcgtataccggtcgtgaagtgcaggatattcccggtgtgttggccgtgtttgctgaacgtcgtaaggacagttttggcccgtatgtccggctgatgagcgtcaccctgaactgaatcaggacgggcattcagatgagcagcattatcaccatcacagtgtatacgctggatgaactttcctgcccggcacggggaaaagcccgcgactggtaccgtcagcatcatgctgacagcaactggtatgaaaacgtgtatgaagacttcagggaggtctgtggcattttcgggattgacctccgccagcgcgttttccggctcagcaatggcaggtttatggaagagccgtgcatctggttcagcggattctgcagccagggggacggagcctgttttgaagggcgctggcactggcagccagcgacaccccggaaaatcagggaatatgcccctcaggaccgtgagcttcatcgtatcgcggataccctgcaggcggtgcagaaacgtaacttctggcagcttcaggctgaaatcagtcaccggggacgttactgccatccgtacagcatggatatcaccgtcacccggaacagtccgactggtcaggcaatgacaaccgatgcggaagccgctgtcagcgaagccctgcgcgacctggccttctggttgtaccgtcaactggaaaacgagtacgactggctgacctcagacgccgctgtggatgaggccctgctcatcaacgaatacaccttcaccgaagccggtctgtgcaccggctgacccgtcatcgttaaactatcattcaccgattttctgtgaggactttatcgtgtcagacacgctccatgaaacaaattatcccgacgacaacaacgaccgcccctggtgggggctaccctgcaccgtgacgccctgtttcggggcacgtctggtgcaggagggcaatcagttgcattaccttgccgaccgcgccggtatcagagggcagttcagcgacgcggatgcataccatctggactaggcttttccactgctgatgaaacaactggaactcatgctcaccagcggtgaactgaatccccgccatcagcataccgtcacgctgtatgccagagggctgacctgcgaagccgacaccctcggcagctgtggttacgtttatatggctgtttatccgacactggcacccgcaaccacctcataaccccgaatatctcacctttagcactaccagttacagagaacttaagatgaaaacattacctgacacacacgtacgggaggcatcgcgctgcccgtctcccgtcaccatctggcagacactgctcacccgactgttggaccagcattacggcctcacactgaatgacacaccgttcgctgatgaacgtgtgattgagcagcatattgaggcagggatttcactgtgtgacgcggtgaactttctcgttgaaaaatacgcgctggtacgaactgaccagccgggattcagcgcaggagtcccgtcgcagttaatcaacagcatcgatattctccgggcccgccgggcaaccggcctgatgacccgcgacaattacagaacggtaaatgacat

SEQ ID NO: 12 - DNA, 4246 bp, Escherichia coli
gtcttcagaggtatcccattatgaaaatcatcacccgtggtgaagccatgcgtattcaccaacagcatcctgcatcccgtctttttccgttctgtaccggcaaataccgctggcacggcagcactgaagcgtataccggtcgtgaagtgcaggatattcccggtgtgttggccgtgtttgctgaacgtcgtaaggacagttttggcccgtatgtccggctgatgagcgtcaccctgaactgaatcaggacgggcattcagatgagcagcattatcaccatcacagtgtatacgctggatgaactttcctgcccggcacggggaaaagcccgcgactggtaccgtcagcatcatgctgacagcaactggtatgaaaacgtgtatgaagacttcagggaggtctgtggcattttcgggattgacctccgccagcgcgttttccggctcagcaatggcaggtttatggaagagccgtgcatctggttcagcggattctgcagccagggggacggagcctgttttgaagggcgctggcactggcagccagcgacaccccggaaaatcagggaatatgcccctcaggaccgtgagcttcatcgtatcgcggataccctgcaggcggtgcagaaacgtaacttctggcagcttcaggctgaaatcagtcaccggggacgttactgccatccgtacagcatggatatcaccgtcacccggaacagtccgactggtcaggcaatgacaaccgatgcggaagccgctgtcagcgaagccctgcgcgacctggccttctggttgtaccgtcaactggaaaacgagtacgactggctgacctcagacgccgctgtggatgaggccctgctcatcaacgaatacaccttcaccgaagccggtctgtgcaccggctgacccgtcatcgttaaactatcattcaccgattttctgtgaggactttatcgtgtcagacacgctccatgaaacaaattatcccgacgacaacaacgaccgcccctggtgggggctaccctgcaccgtgacgccctgtttcggggcacgtctggtgcaggagggcaatcagttgcattaccttgccgaccgcgccggtatcagagggcagttcagcgacgcggatgcataccatctggactaggcttttccactgctgatgaaacaactggaactcatgctcaccagcggtgaactgaatccccgccatcagcataccgtcacgctgtatgccagagggctgacctgcgaagccgacaccctcggcagctgtggttacgtttatatggctgtttatccgacactggcacccgcaaccacctcataaccccgaatatctcacctttagcactaccagttacagagaacttaagatgaaaacattacctgacacacacgtacgggaggcatcgcgctgcccgtctcccgtcaccatctggcagacactgctcacccgactgttggaccagcattacggcctcacactgaatgacacaccgttcgctgatgaacgtgtgattgagcagcatattgaggcagggatttcactgtgtgacgcggtgaactttctcgttgaaaaatacgcgctggtacgaactgaccagccgggattcagcgcaggagtcccgtcgcagttaatcaacagcatcgatattctccgggcccgccgggcaaccggcctgatgacccgcgacaattacagaacggtaaatgacattaccctgggcaggcatccggaggaggcgaaacaatgaacctttccctgacgccggaggccgacggcattaacgtacaggcgatgaacatggggcgcattgtcgttgacgtcgatggtgttaattttgctgaactgattaacgtggcctgcggcaatggctactcccttcgtgttgttgatgaatctgaccggaccgcaactgacagcatgccaccctccgctgccctgagcggtatacgctgcagcacctcacatatcacggaaacagacaacgcttggctgtactcgctgtcgcatcagacgaatgacaccggcgaatcagaatggattcattttacaggcagcggatatctgttacgtaccgatgcgtggtcatacccggttctgcggcttaaacgcctgggcctgtcaagaacgttccgtcgtctggtcgtcactctcacccggcgttatggcgtcagtctcattcatctggacgccggcgcagaatgtctgccgggtttacccactttcgactggtaatcaggacaaaagacactggatgaaattattaaccacagaaacggcgctggatattctgattgcgtggctgcaggacaatattgactgcgaatcagggattatcttcgacaacgatgaggataaaacggattcggcagcactgttgccctgtattgaacaggctagggaggatatccgtatcctgcgccaactgcagtttctgcaacaaaaccggtgagtctcactcaccatacttcattccactgacgccagcctgaacagggctggcgttttcattgtgcacagaaaacccccagctaggctgggggttccggaaagctttcagctttgagccagttattaaaaccccttttgatttgttaaaacactttgcggtctggcaactgcaagtgtcaaacaagaaatcaaaagggggtcccaatggggaacgaaaagagcttagcgcacacccgatggaactgtaaatatcacatagtttttgcgccaaaataccgaagacaggtgttctacagagagaagcgtagagcaataggcagtattttgagaaagctgtgtgagtggaaaagcgtacggattctggaagctgaatgctgtgcagatcatatccatatgcttgtggagatcccgcccaaaatgagcgtatccgggtttatgggatatctgaaagggaaaagcagtctgatgctttacgagcagtttggtgatttgaaattcaaatacaggaacagggagttctggtgcagagggtactacgtcgatacagtgggtaagaacacggcgaagatacaggattacataaagcaccagcttgaagaggataaaatgggagagcagttatcgattccctatccgggcagcccgtttacgggccgtaagtaacgaagttggatgcaaatgtcagatcgtgtgcgcctgttagggcgcggctggtaagagagccttataggcgcatttgaaaaacctccggctatgccggaggatatttatttatctgcgaaaaggaatatcgattatgtctgcaatcacagtctcccgtccggaagtggtcaacgggcatacggacgttatctgctcaaccagtatccgccacattctggctgtacgaaagagtacactgctgcaaatcgacacacttatccggcaactggctgaaatctcatcaatgacagaaagtattggcggtaaaaccgcactggactgggccatgaaacaggattttcgctgtggttgctggctgactgagaaaccggaaaccgcaatgaaagccattacccgcaaccttgaccgtgaaatctggcgtgacctgatgcaacgctccgggatgctgtcattaatggatgcgcagacccgtgatacatggtaccgatcactggagtacgataattttccggaaatcagtgaagagaatattctgagtacgtttgagcagctacaccagaataaggatgaagtgtttgagcgaggagtgatcaacctcttcagagggttgagctggaattacaaaaccaattgcccctgtaaatttggcaataaaattatcgtcaacaatctggtgaggtgggaccggtggggattgcatcttatcaccgggcaacaggcagatagacttgccgacctggaaagaatgctgcatctgttcagcggcaaaccgatccccgacaacagggaaaacataactattcatctggacgatcacatccggtctcttcagggaaaagaatgctatgaagatgagatgttcattattaaatactttaagaagggctctgcgcacatcacgttcaggaagccagaactggttgacagactgaatgatattatcgcaagaacactatcctgacatgctggcagtatagctttgccagtatgctcaaagctcggaaattgtccgataagatatgatcgtggggcatataaaccggtttcagatggcatacccggtggcatactgtctggaaggataaataaaaaagcgcatgtcaaacaataacatgcgcttgtaatc

SEQ ID NO: 13 - DNA, 235 bp, Escherichia coli
agcacaggggcagttttcaagagtccgaaaagcgcatggattgtagatttatttcttatttcctaagattatgaaaccgcaatagtaatatgcaaataagcaattaataatcccgtttactcctccggtcttttaaaattctcaccttcattcagctggtttatgtccttcatgtcttcgttcttgcacggcagatttctgcatccaggcgtgttttcgttatgcgttttgctcc

SEQ ID NO: 14 - DNA, 1028 bp, Escherichia coli
ctggtcggcaatgatatcggctgcggcatggcgctatggcaaacagatattctcgctcgcaaatacaacgccgataagtttgaaaagcgattatcagatctggatgacgttgctgaagaaagctggctggaggaaaacctgccgtcagcatttgcacagcatccgtggcgcaactcgcttggctccatcggtggcggtaaccacttcgtagaactgcaacagattgatcaaattatcgacgcggaactgtttgcactggctggtctggatgcgcagcatctgcaactgctggttcatagcggctcgaggggattggggcagtctattttacagcggcatattgcctcgttttcgcatcatggtttgcctgaaggcagtgacgacgcgctacggtatattgcggaacatgacgatgcgctggcgtttgcgcgtattaatcgccagctgatcgctttgcgcataatgcaacaagttaaggccaccggaagtccggttctggatgtggcgcataactttgttagcgcgtgccaaatcggcgatcaacagggctggttgcatcgtaaaggcgccacgccggatgacaacggtctggtgattattcccggttcacgcggcgattactcctggctggttaaacctgttgcgaacgaaaaaacgctccactcgctggcgcatggggcggggcgtaaatgggggcgcaccgagtgtaaagggcgtctggcagcgaaatacacggcgacgcaactctcgcggactgaacttggcagtcgggtaatttgtcgcgataaacaactcatctttgaagaagcgccacaagcctataaatcggctgaaagcgtggtgcaatgtctggtgctggctgggttaattattcctgtcgcgcgactgcgcccggtgctgacgctcaaaaacagtggagggaaaaaaggatgatcttgctacaactctcctctgctcaggggccggaagaatgttgtctcgcagtgagaaaagcactggacaggctgattaaagaagctacccgacag

SEQ ID NO: 15 - DNA, 7654 bp, Escherichia coli
ctaacgtctccccaagtctactcaagtatttaaaaacctcttataatcagtatattaatgccccttttagtcttttgacgtctatttaagtaccccaaactctacaagcaattgaggggatttgctgttcagtttagtggagatacccccaagtgaaactcaatgcccgtcaaatagacactgccaagccaaaagagaaggcttacaagttggctgatggtggtggtctgtacctcctggtaaaacctggtggaggagaatattggcgtctcaagtatcgtgtagctggtaaagagaagctgttagcactaggtgtgtatcctgaggtcaccttagctgatgctcctgcaaaacttgaagaagctaaaagaggtatctctgggggaatcgatctgatggaagtgaagcgagaggaaaagattgcccgggaaacgcagttaaacaacaccttcaaagatattgcccttgagtggcacagtaacaaattataatcacaataatagtgtatataattatacattgtatgcttggtaatcatataatgataaaagcttccgataatcagtatgagatttgtccttaaactcctggacatgcttttctaaatcttccaatggtatatgtccatttatacaaataaaattctagtgataaataccttcaggtatgattagacaacatctttattcgatgggggttaatctatatttgatatctttcttttaaataacaacgccattaaaaacgctttgtttaatgacgtttttttattgtttcctatataaagcctaaccagcataaacattggtggctcttatgctcattgtaattaaatgagagtgtgattaatgtctttatatattctggtagttattctctccagaagaatacattgtaagaagatgactgttagtatgttttaacatcaattaacattaaggtttgataataattttttgttggcgagttcaaatgttttcatttcatcatctgatagcccgctccagattttctttagcattacattttgagtgtttattagtttttgagcaagtgtaactccgtcaggggttaagcaaatacttttgcttcgacgatcgtttttattattaattcttttggcaatattctttttttctaatttgtctatgatgtgtgtgatgtttgttttggagaattgtaactccttgtaaatatcagaaggggactgacaataatcatcagacatatataatgaaactaacaccataaatgttgaggtgtttattctatactcgctcaattcattttctataatactctggattttgtcatttactctaatatataagtgtattaacagactctcctgagccgggtatgccggatttttgatttttttgtagtttgttatagtttttaataaatctatattattcataattccaccacacggcaaaagaaaactcatgaagattactcaacctgagtgttacatgaagtatcgtgaacgccggaaaatctaagttccagcctgtaccgtaatcagataatcgcagcaaagggacaaagcaatagtccctttgctgcacagcatcagaatgaataacgaatattagcgtttatcgcatcatctgtgttgtatttaccgaatgcagagcgttcaacttccagccccagacgcgtattgtcgccaaaccgggcatttaaccccacaccgtaaagcatacgaccgtcttttctgccattaatctgatgttctcccgctgcatccttcaggtgaacgtcagcactgtccgtcagatcgaactcataatgcaggccggcacgggctgtcagactccagtccttaccactgaaggttttaccggaaacaacgccggttctgcctaccagaggattaacgctgttacgacgcattgagacatccattccactgtcgttccagttaaatgtttggccctgcagtcttccccagaccagttccgcctgaggttcaacaaacgtcgtatctgtcagatgataacggtatccgacttctgcacctgcatacagtgaatggctgcggaagttctgtttaccagctccggcaaagttcaggtcatatttgttttcattgtgaatatatttggcaatcaaatcaaagtaagcgccggaccggaacagaccactggcatagaaaccaccaccccatgattttgttttaccgctgtacaggcctgctgacgcatctgtgtcagtgtaggtggccatcacgccggtaaacaggtccatacttcccagttcgtgcttacggtcagcccccatctgcagcagggtatagtggtcagtgaaaccgccatcagcagagccggaaccgttcagcagacgcacccacgtaccggcttcgccgttaatatccctcaaatcgcccatgcgtttgttcaggttgttaacttcagtgatgaagttgttatagctgatgtgcatgaatgtggcggcagccttaccctggccgtcgttacgtgcaacctggtaaccatcgaggacccactcttttttcccgtcctcttttctgacactaagggtgggggtgacatcactgaatcccacaacccgtgttgatgccctgaacagattatcagctgtcgcttcaggtgcgctgaccagtggaatatcaagcgtgtccttgtcagagggttttttcaggaagttaacccagatgctgttgtcatgacctgttgccgacttgtttatcaccagtttgtctgccttgttaaggtctgtacgcatgacaaatgctgactgaaccgcgtccagattatctgttgtcagtgtcgtgaacgatgatgttcccccgttaaaaccgactattgtccggttaagtttcatatttcctgccgtggagtttccgttcatcgaccactgggtgtctgtcatgctgacggtggcatccggtgcattcaggctcccgctccaggtattgcggtacccgttaaacaggctgtacaacatctgattctgaagagtcaggtcaggactcagttccccttcccctccgagggtgacagtccctttatcctgaacattgatattacctgacaacatactgtacggccccacgttcaggcgggcatcgtctcccttcaggttccatgaaccggcataatcgtatacaggtaaaagtgtgtgagatacctcatcaggacggctgttcagactcagggtggcatcagaaatattcaccggaccgtcagaaacaaaactctgactggccagaacatttgctcccttgttcagattcagggcggtactggtcagcgttgagttctccagaacggcactgtctgaggagatattcacggtactgttgttcgcctgtattccgccattgaatatctcattgatattcagcactgactgattatccaggttgacggtgccgttgaagacgcttttatctgcatctttagttgcaacagatgtgccttcttcaagggtaaatgctgttccctggccatcttttttgtcgataaatacccgactgtcgcccagcgtgacgctggagttatctgcctggatggttgtgttcagtgtggcattgcggcccagaccaaagtctgtatcttttaacacgagcgaaccaaagctgaacgtcctgttctcccagtcatcctgtgtaaatgaggtgggctgtgtcagaacggaattgtcgcccagagacgagactgtatttgcaatactctgagacgttgaagcatggataaccgggtggccctgaatggtcagacgaccgttttcctgagtaaatgtaccggacatattcgctgagccgtccataaccaatgcgccggttgtacccggggttgctttatttgagaaattaatatttcccagcaacttgccatgatacagataccctttattattaattctgtttgcaagcagtgcctgtgcactgttctggtcatgtccgacatattcccagtgctcgttactgacctgaccggtagggaaccagccataactacttgttttcaggataaaataatcgacggtatgagtatagggattattataaatatataatgaacctactgttcccctgtttgatgatgaccattcattaacttttacgtctgccggacgcgtctgataatccagagtgatattagccgttttatcactgctgttaccgagagttgcgccataatcggcggcattcagcttatgaaatgtcaggtcattcccgttaacatccagaacccccccccggtagccccaggatatattgtccggattaacctgctggttgtctgccagcacgactgtcgggcggccgctggcaatattcacgctactgaatgcctgaacgtgtcctgaactgtcagcctgctgattgaggacaacggtcccatccccgactttcaggccgccctcattaacaccggttccctgtacaaccagggttccttcgccgattttatgcaggttgtcacctttcacaccattaacctgccagtttacggaggcatccttgtccacaataataccggccccggtccaggtacttccgtttgaagtggtgacagtgtagtcatcagtaaatgtcagtgaaccggcaccctgcgtgacagagttttccaggtcaatctgaccattatgtcccaggaatgtcagatttttacctgcgttcaggtcagaacctttttgcccgtgcatggcatattcatcggaaccctgtttcagagagccagtgccggtgctgctgtcaaatttccattgcaggggggcgccggatgaggcattaaaaaagacgggagcgtcattatcctctgaatagatctgtgagagaaaactctgaggaataagagaatatatcaaattggtcccccctcctactcccgagtaaacaccgaccagttcccactgccctttggccgtattccagccaaataatggagaaccactgtcgccggcctctccaaaagagggcaggatgctatgatcatgtatgttgccccccatatacagctgaatgccgtctgagccgtgataaaagaatgatgtcgggagtattcctcctgtcagataaccatacccacctgttacccaatgtcgcttaccctgactatcctgaatatactgacttcccgaaccagccctgtagaatgccgagtattttgaagggttcaatatatcagctgttgatgagctggttacggtagccggagcaacctcagttacgagcttatcaagtcttggtgtgtggagatcagatgaactgtgttcattacgatccacaatatggtaactgttctgaccatcaccgaagctgacgctctgatatcctttattatgttttacactggctatatattgcgggttaattaatgttgcaacgccgggatttgagcttacattcacactgctaaaatcaaccatgggcgctttatcaagatgtcctactaattcccctttattattaaaaataggaatgtttgttgcgccagcctgaaactgccctttgttttctgcaaagtcgcggtatgtctggtaaggattgttgccaccaaccgttgatgcaccagcaacggttgggagtaatgcagatagtgccagagaggtaagtactgaaagtctttttcctctgcgggtactccctttacatacccttcgggctagttcagagacaacctttactgtgttagtaatataacaatattttagagcgtatattttattcatagtaaatgattccggaacgtatattccaaagttacattaataaccatagacaatttcaaacgaaagtattgttgaattgcgcgctaattattaattagctatataattataaatgtgatatatgtcacatttatttttgcttaaaactacaatattttgtagttgcacgcattctttgtctgtggttttcgttggtggtaatgaaaatgttgtttgctttttctcaggtgttttgacttatgacttaaagtcataaaatatgcgacgctaatacaactacagaaaaatggtatatatggatatcgacgatatttgttgatttttattttaaattgcgtggcggttcagagcggatatatatatcaccataccatcatctgtttttctgaagttcagattagttttaacacactgttttccatcttcgttgattacaacagtctttttaatgtatttacgaatggcatcattcgacgttctaacggatttagtcgatggtggggtaattaataaaacatttgctgtaatcaaaaacggtaatgtcttcaattgatagaagtttctggtaatctactggtatttaaggttttccatggctaccgttactgttcattgtccgcgctgtaattccgataaagtttatcgacatggtcgtagttgttcccagcatgagcgtttccgttgtcgttcatgtaaacgtgttttccagctcacttactcttatgaagccagaaaacccggctttaaggagctgatcgttgaaatggcgcataatggcacaggggccgtgatatcgccagaacactgaaaatcagcatcaataccgtcatacggacattaaaaagctctcgccccagcggataacatctgcgtcagtcagctcacgctgatgttgcccttatctgtgaacttgatgagctgtggagcttcgttggcaacaaggcgcaacaacactggctctggtatgcgtagaacactaaaactggcggtgtgttggcttacactttcgggccacggaatgatgaggcctgtcgggaattgttagccctgttgactccgttctgtatcggcatggtggccgcgatgactggggcagctacgccagagaagtgccgaaggagaaatacctgaccggcaaaatcttcacgcaacgtattgaacgtaacaacttgaccctccgcacccgcatcaagcggctggtaagtaaaacaatctgcttctcgcgttccgttgcaatccacgaaaaagtcatcggttccttcattgaaaagcacatgttctactgattggaagcactacccaacgttcaacttatcatcataagtataaaaatcacaaaatgggaggtaagagtctttacctggattgtctcgaaatgcaaagtgtgcttgctttacaactaaatctgggggtatctaatgattgcgtaatagtttttttatatacatatcaatgtcttgctttttacaatctgtttatattatccattttaaatcaataggttacacatcgttaataccttccttattttttgattgggacagatttgggaccgatgggttcaggatcgaatctatttaccgtgcgtgttcggtaaggtgattaggtgcgagatgagcatatcgacgaaccatttcgagagtttcctatccgctcatttttaagtgcaagcagggaaacaccggaccaaaccaatcagctgttcgaaaatggcaagcggattaatatgccatggcggctttgagccgcacgcatggggtgtggcaagcctgatggatgttactgtgcttgtggtggcgtctttgctggtctggttgttggttaatcgcgaaaatcattatgcctgaggaataccacaggacgttcaggttttgcataaaaaagcccaccattaaggtgggcaaaaggaatgatttatattctctgagagaaacattacatttctcct

SEQ ID NO: 16 - DNA, 167 bp, Escherichia coli
  misc_feature (55)..(55): Unsure
  misc_feature (156)..(156): Unsure
ggaacgcgttgtggattaaaggctgttggaattcatgacttctacctgatcactnaaggccccatctggattattaccagcctttaccgatcgcacaagtgggaggccaccggaaattgttttttggcctgaaacggggtgcgtattttacctgcngggatacccgc

SEQ ID NO: 17 - DNA, 22130 bp, Escherichia coli
  misc_feature (14113)..(14113): Unsure
taaggcgggacactttcaggattttgaatttattcaatttttccctttctccaaaatctctccaaaacgtttccccaaaactaggccacgcattttacaacacttttttcctgagatggtgacggatattccatatggtgtttgtcaaataaccaacttaacccattcctgacctcgagtatcgttatagcgatcggtggttgcctggactttatgtcctagtaatgtttttgtatcgataccctgtgcacggtacagccgttctgatagagagcgttgttcatgaaatgttggcgaagtttttcctgctggtggaattatcccagccagatcccgtgctttggcaaagtagtcgctcaggttgtctttactcatcggcttcggttgtttctggtgccgactatggattagatatggacttaatattctgtctcggcacccatcaataacttcttttaacgttatcccaatggcatcacagcgtagtgtaagcggtaacgccagacgcattccggtttttccctgggtgatatgcaagtgttcgttccacacatctgaaaaacgcatgtggcaaatgtcatcacggcgctgaccagtaacaatcgcaagaagcattgcgttacggataaagtgtttttcaggcgttgcattgtaaattttttgccagtcttccatggtgagcctggctctggttactttagggatcggtttacgggtagcctccggaggattccatccaggaggaacttcccctgcatgctgtgcttctttataaatatcaacccataatccacgatttactctcgctgtgctgaccatgtctttatccagccactcatccagtattaatgcaaagtctcttacttccagttctttcaatgggtggtttcccagacgggaaaccaggtatgcagccattcgagttttttctttgtgagttgtagctgcaatatctccatttttcagtcgcgtgtcctgtattttcagatatcgatcaacccatgcctttaatctgataccccgacgttttgttgctgacggactttcatcaattttgcgcatgaaatattcagcttctgctgcagctattcgctgattggctgtggaagcgattttttctgccttacctttgtctgttccgagtccgtgaaattttccagtcacaggatttttatactggtagtaaactctgccagttctgcgatcaaacttttcgtaaagaccggctacgtcagtgctgttttttcgtggcctcggtgacatgagttaaaatctccttcagtgcatcatcatcgccagtatgaatttccggcgcaattcccgtttcaccaggcccaacaaatactgctcggcgatctatcagccaacgcccacgaattttttgtggccttggaacgatgtatcctagttttccgtatttcaccagggtagtgtttgttattgggagactgaaccgttttggtttccactcgtcgagcgttatcaggtactgttcgctcatggctatcactccggaacgcgccagttgcagaatatcaacgacaactggcgacggttgaacattaaaaatcagcctgactcgggatcagtttttgccagataactgaaacgtattttgcctggtaacgggcgtcatcaagtgcattatggcgctcaccttcgaatggaatagccgttctggcatcgaagtctatggctttccccagctcaacgattgtgcgtacatcgcgatcgttgtagtaacgccacgggcaggggatcccctgccgttcgtatgaacggcgcaaaatcgtgttgtcgaagttggctccatttccccagacctgaacaaaaaattcaccggagttttcgtcgataaattcccgcaattgtaacagtgcatcatctaacgggatttcatcggtcataatggcagattgcgcttcgcgtgattgcttaagccaccatttaatggtgtcccgatcaatgactccgccagcagtttccagatcgatagtcttactaaattccggtcccatatctccggtttgcggatcgaaaaatattgcacctattgagatgatcggggcatcaggattttttcccatggtttcaaggtcgatcattagatggtcacacgtcctgctggtggatgtgatttcttgatgaccgttcaccttaattgagtgatctgccgtctcgccagtttcattatcgctatcgtgatgctgattgccgccagtgttctccttgtgtggatgttcagcgccttccatttcctccggatcatcttcctgaacttcaacctgatactcttcatcgaatgtttcctggtatgttgcgtcgcccatcaccgcgccacaatcagggcagttgccgccgccggtctgaccgcaggcggtgcagactttttccacttcctgttgcgccactggttcggattgtttcgtttctggctcgttttgtaacgcatttgggctgttttgttccgctttttggtcgttccgttccgattcatgctggttctggttcacagaatcgcgagtctggatccctttgacccatttcggatcattagggtcgctaatcccctcaacaaattcaccacgcgatacagcaagtaacttatcggcgtcaggctggctgatattggctgcctgcataattttgtttacttcgtcagcggtgacttttacttggttagcggaactcacctgcgactgagcatccagcgactgcgcgttctggccatgttcagttgtatccggttccattgtttcagttgttgcctgttcacctgccattgcgtcagatggttgtggtttttcttcttctgtttcacgctcagtaaccacctcgcggttaatttcttccaggatatctttttccggcgtatgccgggcagctgtgagagtttccttgctggggttctcgtgatcagtttccgtcaaataggcgttgatatacccctgaaggcgtcccgggtagtgataaaattcagggtgtgcgcttcggataagtgcaaaaatagcggcgcgggaatagtccagaatacccggggttgcacgaagtgctgcggaccattctttgaacggactttctttgttcaggactacttcttttgcgcgacgataaacgctgcccggaatttcataaatattaaaatccatcggaagtgtggctgctgcaatctccacatccagtgtgtcgagggtgtgtactaaattcggattgcgatcggttttgttcccaccgccagcattagcaccggaagccgtgcgggtgatgcgtgaaacacgatttcctttcatccactcttttgtcagcaaaccccgatcagtgtagtcagcgtctaggtatgcttcgaaaaaagcagttattagtcccaggtctgaattaccaggattagggaaaactttgtcagtgtcacgaaccagtttgtggaggtcgcgaatctccagcgagtcgagcagactggttttatgcgaaatagccagggcagtaacagccggtagttcttcagcccgtgcaatgtgtaatgcctggagttcgtcgcgtgaaacgtgcgttactggtttttcgctgccgtgttgagcaagccaacgaatgggcagttcctgaccggagacaggcagaagcatgctctcctcaatctcagtcatggcttcgccgttgatgttggtattgtcagtgctggctggtttgtcctgaacagagggggaagggccgataaatgtcattgtgatgccatctttcccgcctttttcatagcgattgcagaattcagtatcaaacacgccttctggcggaaggtcgtcaacaacgggcaaattgacgcggacgggttttttaaagtcgtcttcatcataatcgttgtcatccattgcggtaatgcagcgggagattgcaacagataatttttttgctgtagtccagtaaaaaccacctttaattcctaggcgttttcttactttgtcattttttgcttcgcaatatagtgcaaattcttctttatcagtgctcattattggtaaacctcatcacagatttaagggtgaacaaatctctgccattgctgacatataagaatgaaactggatatttattacggtgctgttttaaaatcctgccgggatttcgttattatcctggtgaataactttatcgaccggataacagttgcctggaattttctgttcggttgctgctgccatacattcctgcattgttctgtgaacactgactgcaatatcaactggctctccggaaacaagaaaaaccgtcagaataagtgcaaatactggattcattgtgcacatccttttggcatcagacgtaaacgggccagcattgaaacaatgcatactttatttaataactcccgttcgtgttttcttttgttaatggcctcttcagtaaatacaggattactgatagtgacaccaatttcaaaacaaccttcagacgtattaacgtttggtaataacgttttcattatcgcgccctcaacaatgagttttgtgatgcggtgcctggtgcctccaggtgacgttaaccagttaacaattaacgccggatacagagaatccacccataacactgtttttggttttaactgttccgcgtgcgcttagccgcattcaccgcatcacaaaattcactttaaaaagggcggcagagcagtcacggagtaaaactgataccgccaaacgtcaccagaaaattgataacagagggcgttgcagcggggttgtcacttaagcgtatggtcaacctgacaacccggtgtcctcaacgggggaaggaataaccccgccatacttaccgccgcgccatttcgcggattgccacaaccggaagcgcacggtcgacgaaaatttaacgacaggctatctatgaaccagctacctcgccgtgcgctttcgcgttatggtctgacttttcagggaaatatcctttcagtaaactgtcagtgccggatgctcacccgtgtccggcgcacgcactccacctcacccgtggagaactccttaattaccaaccttagcttcgttggttatctattaacgcgggtatgtaatcattctggcaatgcttaatgccgctgctttttccagcctggtgatatcctgctccagagcggacagattttcagcctgcttagctctggcttcattagcccatttcagatcctgcgctgcattaattttctggcgcatccactcataaagttcatcatcggtatagtctggcgcgatgatgacgggttctcgtttctgcatactgattcctcgcggtgctgtttcgcttatcagccgttagattttgccgaactggaaagcgcctgtttaaattcgttgaagctgtgagcttcttcgccttcggcaaggccttcgaagtattcttcgtaagccttttccatgattgtgtcaaaatccatatcactcacctgagtttctttccagccagcgacgggcaccattttcggttttaaacgttttgctttttgtayacgtcaakgcggtgaaggtgccgtcctggtttggaaacacgccgtacaccagagattcgttgttgccaagatcgatagtatccatgctgacctcatttccccttaacgccggggtagcggaacaaaaacctgctgcatagttattaaagttgaaccctgccgtcatgttcttacgcctcgggctggctacttaacccctgaccactgcctggtaactcgaagtattgccctgcattctgtggggcggggtgggttggtatgaaaagaaggatacccataggtatttaaaaagtaaatacccatgggtaactttttgcggtgtcttaactggtgactagttgtttggtgagctatgatgcgttttgtgctttctttttacggatttcttcgtagatcatattgtaatactgttttttctcttcaagagtttttaataagttatccgcttcactttctggcagttcgtctaagagatctaaaaaaatacgttgtcgtggcgttagaacccttgtttcataactggaggctgtgttcgttgatgatgaaacgataccatccatccatccccggggtaacccaaaggactcttcgataatctccaccatatcatcagcgatccgtttttttccctttttcccctctgggtacaacattcttgatacataagaaggctcgcgcccgatctttctggccacgttaaccgctttaccatcgcatttctcatcacgaattttgatgagttgctgtcgtctaaattcatatttgtccataggtaaataatagatgcgattactgcaaggtaaacaacctgtgggtattgacttttgtttacctgtgggtattctttgctgtgtttactaaggagtagctatggaagaattaagaatatttctcaattctctttcgtcagatgaacagcgtatgtttgcatgcgagtgtggtaccagcatcggttatctaagaaaggcattgagtaaaggtcaagtgttaggggcatcgttatgtgtccttattgagcgagccagtaatggtgaagttacacgtcagcaactaaggccttttgattggatgaatatttggcccgagctggaagataccaaaatgttaacacaaccactttctaggagcttgattcatgaaaatcaagcatgaacacatccgcatggcgatgaatgcctgggcgcatccggacggtgaaaaagttccggcagctgaaataaccagggcttattttgaactgggtatgacgttcccagaactgtatgacgacagccatccggaagccctggctcgcaatacccagaaaattttccgctgggtagagaaagacacccctgatgcagttgaaaaaattcaggcgttgttaccagctatcgaaaaatcaatgccacctctgctggtggcccgaatgcgcagccatagctcagcctattttcgggaactagtggagacgcgggaacgactggtgagagacgctgatgattttgtcgcagtggcgatcgctggtttcaaccagatgaatcgtggtggccctgcaggaaatattgtggctgtgcattgactcgcaatattcataccggatcacttccggcaatttgtgagtaaaaagattcggtatcaaaagaggtgagtatggctaacgcctggctcagattatggcatgacatgccaaatgaccctaagtggcgaacaattgccagggtgtcagggcagccaattgcaacagtgatggcagtgtatatccacctcctggtgagcgcgtcacgaaatgtcacgcgaggtcacattgatgtcacgacagaagatttggcaagtgcgctcgacgtgacagaagaggtaattgattcaattttgcagacgatgcaggggcgggtacttgatggtgatttaatcactggatgggaaaaacgccaggtgcttaaagaggacaacggcaatatttcgcaaaccgcaaaatctcctgcagagcgcaagagggcgcagcgagagagggaaagaaagcgggaacaaaatggcgattgtcacggcgcgtcacgaaatgtcacgcacatgtcacgacgagtcacgacagataaagatacagatacagatcaagaagatcaaaacactatggtccatggcgtaaaaaacgccacgaaccaggcaggggatgttcagaccgtcaatcttggtcagccagcaggcacgacaccggaagccgattcagcgtatgcgctgaaagccgattcgggcgctgtgcagcaggtgatgaccgcaagggcggagcaatcacaccaactgcagcagcctgaagccgattccgccattcagcgggaagccgatcgggtagtcccggaaaacaccgggcagtctgtgggacgagtggattatccggatgtgttcgaacaggtctggcgggagtacccgttgcgtgctggggcaaacccgaagaaatccgctttcagtgcctggaaggccagattacgcgagggggtgccgccagaggccatgctggatggcgtgaggcgttacgcaagatacttggcggctaccgggaaaacgggaacggaatttgttcagcgagcgacgacgttttttggaccggaccggaattttgagaacccctggttgctcccggtaagcggcacgaacaaccagcgttgtgtgaatcatatttctgaaccggataacgaaattccgccgggcttcagggggtaagtgttgatttctggtcatgaggtaattttcaggagggcttgtggcaaaagtttttacacaagaagagcgagaaaaaattaaagggcaggttgttgaactcgtacgccagagtgggcgtgagacgttacggcaactggaagtcaagacaggtgcgacaagatatctgatgagcgttctcgcaagagagctggttgccagcggcgatgtatacaactccggctacgggttattcccctctgaacaggcgcgtaaggactggcaaaacgcccgcaaaaaactctcgagggcaaaggtgaagaaacctgctgtggttgatccggaccttatctggtcatcacctgacggagaaatacgtcgctacgacagtcgcctaaacataatctgtcgcgagtgccggaagagtgaagctatgcagcgtgtactggctttctatcagggtaattttcaggaggcggtactgtgagtgaaattagctatcaggcttcaattaccgctggcattcgcatcaaaggagaggagcatggaaataaaaccagaggatgagttaagcaatatcgttttatttccggtaaaagaggatgaccctcgtaatcaggttaattttctttatgagccatcggaaagaccatattgtcatcacgcctctgtccgggttgacgaaaaagagcgtcaggtccgctgtaaaatctgcggtgcagttgtggagccatttgactggatgctctctgtggcgaaaagagaaaccagactggcagatgatgtaaggctcttgcgtcaggaggagcgggaaaggcgaaaaaatatagaaaagctaattcagattgagcgtaacgcgaaagcgcggatacgcagggcgacaaaatccagaactgaataattaaatttagctctgttaaaaatttaatccttaaccggagggatttctgcaccctcagaatatcaggaggccgcccgaaagggcggtagttaaatgcgaaagtttaaaataattattgaaacgggaatagccggtggagatttcgaggatgaattcgaagtggatgatgatgcgacgcctgatgaaatacatgacgaagcaaaagatattttctttaactactgcaattactcatatcacgaaataaaagacgaagaggaagaacaaaatggctgattttggttcaactaaatacaacgtcagttttgaagaatggcatgaactgttaatggactatgcagagttacgtggtggcagtgctgctgatgctgaagcatggcgtgatgattatgaagcagaaaaaactccggtcgaagcatattgtgatgagtggggcgatgaatgagcgaggttaattatcaggaagggcatgaaacggcggggcaagcaaaaacagtggcatggcgatatcgctacgtgaaaaaaaaggcgttacggactttcaggggaagtagtggtctggtgactggaaatatgtaccgaaaaaagaggattgtaacgacaggccgaactatgaaattcaggccttattcactgccccgccagtcccggttacatcagaagaactggttaaagctgtgcacttttatgaacaactaaaacgcgaaaatccaccagcatccggaaacctgattacagattcccagataaggcaatgagctacctggcgcagaacgggctgataagtatggggaatgttttacgatgaatatttagactaaagagtttgtaacgctatgtaagtgattttttctggtttagatatttatatatccggccaaattgaggtgtgtttaaatgtaattgcacattgattgtaggaggaataatgaaaaacgcattgcagtttttgtttgttgcgttctggttgttcgtatcatgtatgcccatcatcttcacagcaaggtatatggaaaaagttgatgttttgatattaatatttggatatataaatgccctttttttaggggtgttcatggcggtcatgtgcattgaatactggcggtaaatacagcgaacgccattggtttagttggatatttactgtgccggacaaaaacggtttgcggggaaatcttagttaagtagaatgactgcgggtgcttgaggctatctgtctcaggcatgaacaccaaaaggcagatagagaaaagccccagttaacattacgcgtcctgcaagacgcttaacattaatctgaggccatatctatgcgacacatagagattagcctcttacggaccgaaaggtcaaggagaagcaggctatgaagcagcaaaaggcgatgttaatcgccctgatcgtcatctgtttaaccgtcatagtgacggcactggtaacgaggaaagacctctgcgaggtacgaatccgaaccggccagacggaggtcgctgtcttcacagcttacgaacctgaggagtaagagacctggcgggggagaaatccctcgccacctctgatgtgtcaggcatcctcaatgcacccgcacttaacccgcttcggcgggtttattttatctgtaaatatttttataaaaataatgcccacacacagcataaaacaaaaagtatcacagataaaaaaggagcgtaatgtgcagatttgttgttttccatatttactcactttaacataatcaatattgatatggttgttgtttcggtggtttcaaacgagatgttatggtgatctggtaaaattgcataacattaaaatttaatttatctaatcgcttttaataataagcgttgtgtttatcccaacaatctgttgtttgacttttattccattaatgtaggggctttacactggaaccagtttatttatactttatacgccagcctgaacaactggcacctgctgcgccagcagagacaaccgatggcgcacgataccaaattacacaattctgatgattctgccgtctttgccagcaggtgcggacggcgttttcatgcattcaaatcggactggttccagcatccaccatgcactgaagagcaggctgaatggataattcagtgttaccgcaggcgcggatacgaggttaaaaaagcccttagcctcgactaccgtcactggataatctcagtcagattgccttactccgaacgcccaccgcgtccgtcccgcacattccagcaacgcatctggaggtaacgtgcgggtattacttcgacctgttctggtaccggaactcgggctggtgatcgttaagccgggccgtgaatccatgccggtattccacaatacccggttactggtggagccggaaccgaaaagcatgcgtaatctgccgtccggggtcgttcctgccgctcgccagccgctggtggaagacaaaacattgctgccgtttttcagtaacgcacgggtgattcgtgctgctggtggtgctggtgcattgtctgactggctgttgcgccatattaaatcctgccagtggccacacggcgattatcatcacagcgaaaccgtcattcaccgttatggtaccggcgcaatggtgttgtgctggcactgcgacaaccagctgcgtgaccagacatccgaatcactcgagcaacttgctcatcaaaacctgtcagcatggatgattgacgtcatcggtcacgcaataagcggtacgcaggagcgtgaattatctctggctgaattatcctggtgggcggtccgcaatcaggtggcggacgcgctaccggaagcggtattacgtcgttcgctggggttgcgtgcggaaaaaatccgctcaatgtaccgtgaaagcgacatcgtaccgggagagcagaccgccaccagcatactgaaacagcgcacaaaaaatcttacgccgctgcttcacgcccaccagcaacagaacccaccacaggaaaagacggtggtcagcattgccgttgatcctgagtctccggaatctttcatgaaacgacctaaacgtcgccgctgggttaacgagaaatacacacgctgggtgaagacacagccgtgtgcgtgttgtggtaagccagccgacgatccccatcacctgattggtcatggtcagggcggaatggggacaaaatctcacgatattttcacgctaccgctgtgtcgggagcatcacaacgagcttcatgcggatccgctggcgttcgaagaaaagcatggttctcaggttgatttaatttttcgttttcttgatcacgcctttgcaactggcgtgcttgggtaaaagaggtgactgatgctcatagatttggttttaccttacccgccgacggtgaacacttactggcgacgccgtggcagcacatattttatctcggaggagggaaagcgttatcgccgggctgtggcgcttattgttcgccagcagcagctgaaattaagcctgtccggaaggctggcgataaaggtgattgcagagccaccggataagcgtcgtcgcgacctggacaatatcctgaaagcaccgctggatgcgctgacgcatgcgggagtgttaatggacgatgagcagtttgatgaaatcaatatcgttcgtggtcagccagtatctggtggacgtctgggggtgaagatttaccccataatgcattaagagcaggtcaaaaaatgaaactggaagatttaccgaaatactactccccaaaatcccctggcctgaccgatgcatcggcctcaacgtcaaaagatgcgctgagtatcactgatgtgatggccgcgcagggcatgacacagaatcgggctgagatgggtttttctgcgttcctggggaaaatgggcatcagtatgaatgacagggcgcgggcaacagaattactggcagattatgcactcagtcggtgcgatcgtgtggcggcgttgagaaaacttccggcagaaataaaaccggtagtgatgcgcattatggcttcgtacgcttttgaggattatgcccgcagcgcagcgagtaaaaagcagtgcccttgttgctatggggaaaaatttattgaaagcgtagtttttacaaacaaggtccagtatccggatggtaagccgccggtatgggcaaagtgtacgaaaggtgtgtatccgtcttactgggaagaatggaaaaaagtcagggaggtggtaaaagttgcctgtccggagtgtggcggaaagggtgaggtttccaccgcctgtaaggattgccgtgggcgtggtgtcgccattcaccgtgaagagtcggtaaaacgtggtatgcctgttatcagagactgccagcgttgtggtggtcgtggctatgaaagactaccatcaacggaggtatttaatgctatatgcgaggtgacaaaccagataacacgcgcgtcatgggaaaaaacagttaagaaattctatgatgcgctggtgacccggtttgatattgaagaagcatgggctgagcggcagttaaaaaaggtaactaggtaacaaggttgatttttccggaatctgtggtaaattcgtcataacgatgggctttttatgcctgacgttagaagagtttctacaacccgccgccgagcgggttttttattgtgcacagaaaacccccagctaggctgggggttccggaaagctttcagctttgagccagttattaaaaccccttttgatttgttaaaacaccttgcggtctggcaactgcaagtgtcaaacaagaaatcaaaagggggtcccaatggggaacgaaaagagcttagcgcacacccgatggaactgtaaatatcacatagtatttgcgccaaaataccgaagacaggtgttctacagagagaagcgtagagcaataggctgtattttgagaaagctgtgtgagtggaaaagtgtacggattctggaagctgaatgctgtgcagatcatatccatatgcttgtggagatcccgcccaaaatgagcgtatcaggctttatgggatatctgaaagggaaaagcagtctgatgccttacgagcagttgggtnatttgaaattcaaatacaggaacaggragttctggtgcagagggtattacgtcgatacggtgggtaagaacacggcgaagatacaggattacataaagcaccagcttgaagaggataaaatgggagagcagttatcgattccctatccgggcagcccgtttacgggccgtaagtaacgaagttggatgcaaatgtcagatcgtgtgcgcctgttagggcgcggctggtaagagagccttataggcgcatttgaaaaacctccggctatgccggaggatatttattgcggaattaattacggaccgttattattctgctcccggccctttagctcagtggtgagagcgagcgactcataatcgccaggtcgctggttcaaatccagcaagggccaccatcacataccgccattagctcatcaggaaagagcgccagctttcgaagctggttgcgcggagttcgggtccccgatggtggtccattatcggtattctgcgttgttagctcagcaggacagagcaattgccttctaagcaatcggtcagtggttcgaatccagtacaacgcgccatattcattcttccagattccttccggcagagccttatactggaatatacctggctcaggatattgttgaaaatattatatgtttgtcaaaaataaaagttctgttaagtattgattgagtgtttgttatacggtctaatggttttttcagcattaaatatttatcattcatatggtgtgggtagagtgaatattgatgaggcgtcggggtgtttcatccttaggcagcgtattgatatagtcaatgcagcacgagcaaaggccttcagccgtttgacagttttgttttgtactcctgatcgtctttcgggaagagacgttattattctgaatagtgatgctatacagagggttagcgatgagttcatggttgctaattcagaattatttgctcttgttcaggagtacaacagaatagccaggacctgtggtatggatgaacttcggattactcatctggggtagatacatatctggattatcacctgttacggtaaaaagtgattgcttactgtttttgtgaatggcattgcagcagccggataatgtcagtgctggctgacggtgtgctggtggcaggtgtggtggttgttgcttttccgttgctgaaaaagaaaacgccagactgttagccgggtatcagttagcgggagaaatttttaaatacttcacaattcaggcggttgactgttgtctggtttgcggggagtttgttaaaagaaactggcatggtgaatccccctgtgcggaggggcaatcagcgagtaggtatatgggataatcgcggattcaggtgctggtactgaattcaccgggaggcacccggcaccatgcaatggcacatagcgccactctccagcccctctccggaggggctgtttatattgattttgtcagatgtgagtaaactccttatggactttgttgttttagtccataaggacatatttgcagagtgcaacggttattaaagcattcattcaatacgttatctgtatttgtagggcattcctggctgtttttgattaaattccagaatgttttattgaatggtactacgttgtaaatggttacaggtagcactttgttattgagcatgatgcctgtgtgagtcagtgtaaatatactttcaggaggtaagaaagcatccgattgataccagattattaattttattttactccatatgactgaaaaagatattccgcatgatggctggataactgtatcaatcacaatccacttcatttggtttccttgtttatgccttgctggtgatgtcctgaaaagtataaatgatatttttgaatgtaaaccatagagcagaattatttttctgatgttgtttattgtttatttaaatgcagggtggtttatatctcgtcttgtagtttatccatgcatatctgcttgataatcaggtttttatttaaggtatagttttgtgttttttctgtattacatgtcaggtattttaaagaattatttttcagatagtggaaagaaccatggcatttaaacactatgatgttgtcagggcggcgccgccgtcagatcttgcggaaaagctgacacataaactgaaagagggctggcagccgtttggtagtccggtggccataaccccttataccctgatgcaggcgattgcagcagaaggtgatgtggtggtcagtggtgcaactgagccggagtgatactacgtcatcgtactggcccggcattccaggccataaaagacagtctggcagtgggactaaatgcactgacgctgacggatattaccaaaaatgcaacgtatggcgttgagatagaaagtctggcgctggagataaatgcaccggcatcatcataaaaagtgagccagtcaaatggaaggtatcgttaaactcaccggtagtgtcagtgggtcgtctgagacgcttgcatgagttatcagagccatcagtagttaactggtggcttttttattgttgtcagcttccggataacgggagacggggtatggaccagatggaaaaaatcacaacaggtgtgtcatacaccacgtcagcggtgggaacgggctactggttcctgcagttgctggacagggtttccccgtctcagtgggcggcaataggcgtgctgggaagtctgctgtttgggctgctgacatatctgactaacctgtatttcaaaatcagagaggaccgtcgtaaggcggcacggggagagtaattcaatgactcaaaactatgaactgattgtgaaagggatccgcaattttgagaatacagttacggtaactttagcgttacgggacaaaaaacgctttgacggtgaaattttagacctggacatctcgctggaccgtgttgaaggtgccgcgctggagttttatgaggcagcagccagaaggagcatcagacaggtcttcctggatgttgctgccgggttatgtgaaggggatgagcagtcaccggaaaagcgccccataattttagaggcgcagggtgtgtggataacctacaaaggaaaactgccgggaagaattactggttcactgaagactccgccgaaatggtaatttcaccagcatatttttcttccagtaataccgccagccacttgaaagaattttgttgttgctgggaccatttggggttgagtgattcaagctggagcgatgccagtgttggttgcatttgttccttgggaattgagaatgccagatatgaaaatgcgacagtaagggcatttacatcatcccgaagcttggaaatgcagtcgagcaactcctgtagagaaatggtgctattgtccataaacaatcctctctattgtatttaactattccttgcctgattcaacaggccgggacagataaacatatccagggttcagaaaccgataaatcctgataaatatccatgaacgcaaaaatcagatacggcctgtcggctgccgttctggcactgattgccgtcggtgcgcctgcgcctgatattctcgaccagtttctggatgaaaaagaaggtaaccacacaacggcataccgcgatggttccggtatatggaccatctgtcgtggtgccacaatggtggatggtaagcccgtcataccgggaatgaggctgtcgaaggaaaaatgcgaccaggttaacgctattgaacgtgataaggcgctggcatgggtggagcgcaatattaaagtaccactgaccgaaccacagaaagcgggtatagcgtcattctgtccctataacattggccccggtaagtgtttcccgtcgacgttttataagcggctgaatgccggtgatcgtaagggcgcatgcgaggcgattcgctggtggataaaagatggtgggcgcgattgccgcatacgttcaaataactgctatggacaggttattcgtcgtgaccaggaaagcgcattagcctgttgggggatagatcagtgagcagagtcgcagcgattatttatactctggttatctgcaccatcgtctgcctgtcatgggctgttaatcattaccgcgataacgccattacctacaaagcccagcgcgacaaaaatgtcagagaactgaagctggcgaacgcggcaattactgacatgcagatgcgtcagcgtgatgttgctgcgctcgatgcaaaatacacgaaggagttagctgatgcgaaagctgaaaatgatgctcttctgcggaagcttgataatggtggcagggtgctcgtcaaaggaaaatgccctgtgccatcctcagccgaaacctccagcgcctccggcatgggcaatgatgccaccgtcgaactctctccagttgctggacgaaacgttctcgatatccgggacggaattatccgcgaccaaacagcactgagaacgcttcaggaatacattaggacgcaatgccttcgatgatagcaataattttactcatcatccttcacatctggctctgtagacagggtggtgatcacttctggagtaaatccagattaaacatctcattgctgatgcttgatattgagcatctggcgcgcagtaaggggctgcgttgagataagagccagttcattacaaataccaggatttagcctcgcattcgcggggctttttatatctgaatttcacagcgcatctcacgcgcatattaacgagagcctttcagtaagcgagcctgagaaatgccgttataggtggcgacctctctcgggcggcttttctgtgagacaggctcactttctaaaaggtaaagacgctatgaataatcattcagttattccagccttcgacttccgagaaatggtgcaagccaaaaacggagaggtcgttaccacatccagaaaaattgccaagtacttcggcaagcgacacggtgatgttctcaggaaaatcgagcaggttaaggctgattgctcgcgtgagtttagccaacgcaattttgcgtcggctgattatatcgatgagcagggcaaggttcgcccgatgtacagcctgacgaaagatggctggatcatggttgtgatggggttcaccgggaaagctgctgcggcaatcaaggagagctatatcgcagcattcaactggatggcagagcaactgagccgccgcatggcaattggcgaagaaatgcagcaccgctacgccaccaaagaaacacgctcaaagctgaaaggtacgatcggcagtcggttaatgaacgaacggaagaaagagaagcgtgtcctggctgtcgagcatgaatacatcttgcaggtgacacagcctgaactgctgattaattgaagatgtcattacaaagcctatctacggggggcttgataatggcttataccctgcacgggataacttaactgatatcccttttaacggataaaggtattcaagcctgacacatcatgcgctgtatcgtcgccgtattcccgcattaaccatgaccgtagcccgacggggaattccttctgcgtgagtgtgcgggaataatcaaaaacgatgcacaccgggttattaacgcgtcaactgaacgcggggttgctcttcatgtcagccagtccggtgcaggggtagaagaaaccggacgttatggtttagtgtggaaacatttgtgatgtgctctgtatgttttcagtaaagagtaatgaattatcaaaggtatagtaatatcttttttgttcgtggatatttgtaacccaccgaaaaactcctgctttagcaaggtttcttctgtattcctgaaatgtgatctctctggatttcagcttattagaggtcgtttctataagatgcctatcctttgaaaatttgacagacacaatgttttttaggccctttaataacactgtattatcattttttaatacaatatgaacattctctgtggctaaatagtaaatgtaatgtgagacattgtgacgttttagctcagaataaaaccattgatagtttaaatcgtttcgaactttatcaaatatttgtttaaaaatgactacctgatccatagataaaccttccatgtgatatgagggggcgtagtctgcacgattatctaaattgcttcaatctggtctgacctgttttctgagcaattcagtaatgtcactcttttctttgtttgcttcaggagaaactcttttttctgagcacagtctccggcggcaggcttcaatgacccaggctgagaaattcccggaccctttttgatcaagagcgatgttaatttgttcaatcatttggttaggaaagcggatgttgcgggttgttgttctgcgggttttgttcttcgttgacatgaggttgccccgtattcagtgtcgctgatttgtattgtctgaagttgtttttacgttaagttgatgcagatcaattaatacgatacctgcgtcataattgattatttgacgtggtttgatggcgtagatgcacgttgtgacatatagatgataattattatcattttgcgggtcctttccggcgatccgacaggttacggggcggcgacctcgcgggttttcgctatttatgaaaattttccgggaaccatgtccggtttctcttcaagttaactatatgaaaaataaaaaaagaggtcttctgtgaaccgggcatgcacaaaaaatagacatgtaagccggacatgaccggttttgttgtgattgtgaagtgagagtttttgcgaggtgaggagtggctacgcagactgaagttgccaggcatttaagtctgaccgatcgccagcttcgcagattgcagaaattgccgggtgccccgatatcgaataagcgagggcaactggatctggatgcctggcgcgatttttacatatcgtatctgagaagaagtaaaaacgatgtgcctgatggcgatagcgaagacgactatgaggagaaattgcttattgccagatgggaactgacagcagaacaggctgttacacagcagttaaaaaatgaggtgtcaaaaggaaaacttattgataccgggttctgtatttttgctctcagcaagctggcaatggcgttatccagtacgcttgattccatccctttatccatgcagcgacagtttcctgatttaacaccgcgccatcttgaccatctgaaaacccttattgcgaagggggcaaatcagtgtgcgcgggcgggggataaattaccggatttactcgatgaatatatcagagcaacaactgaataatatgatgagtgctgtcacaacagcattacagcccctgataagggcattgccggtgacgccagttgaatgggctgatcaaaattattatctgcctaaagaatcttcatatggtgagggagaatggaaaacgctgccgttccagatcgccatcatgaacagcatggggaatgatcagatccggactgttaatctgattaaatctgcccgtgttggctatacaaagatgttgctgggggtggtcgggtattttattgagcataaatcccgaaacagtctgctttttcagcccacggattctgccgctgaagattttatgaagtctcacgtggaggcgacgattcgggatgttccctgcctgaaaaaactttctccatggctggggcgtaaacatcgtgacaatactctcacgctgaaacgcttttcatcgggtgtgggcttctggtgcctgggcggcgctgccgccaaaaactaccgtgaaaaatccgtggacgtggtctgctatgacgaactttcctcgttcgaaccggatgtcgaaaaagagggttcgccaaccctgcttggggataaacgtattgagggctctgtatggcccaaatccattcgcggctcgacgcctaaaatcaaaggcacctgccagatcgaaaaagcggccaacgagtcggcgcatttcatgcgtttttatgtgccctgcccacactgtggggaggagcagtatctgaaatttggcgatgaatccacgccttttggccttaaatgggagaa

SEQ ID NO: 18 - DNA, 43602 bp, Escherichia coli
  misc_feature (32650)..(32650): Unsure
  misc_feature (32655)..(32655): Unsure
  misc_feature (32708)..(32708): Unsure
aaggcattaattttaatcagaacaatcacgtggtgattcagaacgacggccccaacgggcgggcagggccgcagctgatgaaagcggtgtatgagatggcccgcaagggggcacaggatgaactccggctgcagttgcgtgatggcggtatgttatcagggagcggtggatgaaaacctttcgctggaaagtgaagccggatatggaggtgaactcgcagccatcggtgcgtgaagtgcgttttggtgacgggtactcacagcgtatggcggcagggctgaatgctgacctgaaaacatacagggtgacgctttccgtgacccgggaggaggcccggcatctggaagcgttcctggcagagcacggtggctggaaggcatttttgtggaagccaccctatgcataccggcagataaaggtgacctgtgccgggtggtctgcgcgggtcgggatgttgcgcgttgagttcagcgcggagtttaagcaggtggtgaactgatgcaggatattcgcgaagaaagtctgaacgagtcggttaagtcagagcagtcaccgcgggtggtactctgggaaatcgacctgacggtacagggtggtgagcggtattttttctgtaatgagctgaatgaaaaaggggagccggtcacctggcaggggcgtaagtatgaggcatacccgattgacggcagcggctttgagatgaacggccggggcagcagtgccagaccgtcgctgacggtgtccaatctgttcggtctggtcaccgggatggcggaagacctgcagagtctggtgggggccacggtggtccgccgccgggtgtatgcccgttttctggatgcggtgaatttcgttgcgggcaatccggaggcggacccggagcaggagctgagtgaccgctgggtggtggagcagatgtygcagctgacagccatgacggcctcgtttgtgctggctacaccgaccgagacggacggggcgctgtttcccggtcgcatcatgctggcgaacacctgtatgtgggattaccggggagatgaatgcgggtataacggtcctgcggtggcggatgagttctgacaaccccaccacggatatccgtaaggacagatgcagcaagtgcatgcgcgggtgtgagatgcgcggcatggtggctaattttggcggtttcctttccattaacaaactttcgcagtaaatccaatgacacagacagaatcagcgattctggcgcatgcccggcggtgtgtgcctgcggagtcgtgcggcttagtggtgagaacgccggagggggagcggtatatcccttgtgtgaatatctctgcagagccggaggcgtattttcgtattgcaccggaagactggctgcgggcagagatgcagggggagattgtggcactggtccacagtcatcccggtgggctgccctggctgagcgaggctgaccggcggctgcagataaaaagcgcactgccctggtggctggtctgccggggtgacattcacaaattccgctgtgtgccacatctgacgggacggcgctttgagcacggggtgacggactgttacacgctgttccgggatgcttatcatctggcggggactgagatgccggattttcatcgcgaggatgactggtggcgtcacggtcagaatctctatctggataatctggaggccacagggctgtatcaggtgccgttgtcagcggcgcagccgggcgatgtgctgctgtgctgttttggttcatcggtgccgaatcatgccgccatttactgtggtgacggcgagctgctgcaccatattcctgaacaactgagtaaacgggagaggtattccgaaaaatggcaacgacgaacgcattctgtctggcgtcaccgccactggcacgcatctgccttcacggggatttgcaacgatttggccgccgcctcagcctgtatgtgaacacggcagcggaagccatccgtgccctgtcgttacaggtgccgggctttcgccgtcagatgaacgaaggctggtaccagatacgtattgccggtgatgacacggcaccggaggcggtgtacgcccgtcttcacgaacagctgggtgagggaacggtcatccacattgtgccgcgactggccggagccggaaagggcggactgcagattgtgctgggggcggcagccatcgtgggctctttcttcacggccggtgcctcgatggtgttatggggtacagccctgagtgccggcggtttttctgccaccacgatgctgttttcactgggggccagcatgatactgggcggtgtggcccagatgctggccccgaaggcaaaaacaccggattaccgcgcaacggataacggcagacagaacacgtacttttcctcgctggataacatgattgcccaggggaacccgatgccggtgccttacggggaaatgctggttggctcccgccgtatatcccaggacatcagcacccgtgatgaaggcgggggcggaaaggtcgtggttatcgggcggcaggggtaaaaagaataaaaaaatcccgcagtgatcgcggacaggaactgcgggagagttacgaagattaagtgtaaggaattattcttatatcacgacaaaaaaattaacgcagagaaattatacgcgccacagtcagtttgtgaaaatgtgaagatattcagaatttttatgccattaccggttttaaccaacaggattatcggtgggcatgaaagaaaaccccggtatctgctgataccggggtttctctttagcatggcagaaatgtgtttcatgcttttcgggcgaaggatatccgacttctgtacggaatggcaagtggcggttaatttattcaggggaaggctgtatgggaaaaggtggcggtaaggcacacacgcctcgtgaggcgaaggataatctcaaatccacgcagatgatgagtgtgattgatgcgattggtgagggaccgatagaaggtccggtgaagggactgcagagtattctggtgaacaaaaccccgctgacggacacggacggtaatcccgtgatacacggtgtgactgcggtctggcgtgccggggagcaggagcagacaccaccggaaggctttgagtcctccggagctgaaaccggactgggcgtggaagtgacgaaggcaaaaccggtgacgcgcaccattacgtccgcgaacattgaccgcctgcgggttaccttcggggtgcagtcactggtgcagaccacgtcaaagggcgaccgtaatccttcctctgtccggattctgattcagttacagcgtaatggccgctgggtgacggaaaaggatgtcaccattaacggcaagaccacctcgcagttcctggcctcggtgattctggataatctgcctccccggccctttaacatccggatggtcagggagacggcggacagcaccacggaccagctgcagaataagacgctgtggtcgtcatacaccgaaatcatcgatgtgaaacagtgctacccgaacacggccattgtggggctgcaggtggatgcggagcagttcggcggccagcagatgacggtgaactaccatatccgcggtcgcatcatccaggtgccgtcaaactatgacccggaaaaacgcacgtacagtggtatctgggacggcagcctgaaaccggcatacagcaacaacccggcctggtgtctgtgggacatgctgactcacccgcgctacggcatgggaaaacgtctgggggcggcggatgtggacaagtgggcgctgtatgccatcgggcagtactgcgaccagacggtcccggatggtttcggggggaccgagccgcggatgacctttaatgcgtacctggcacaacagcgtaaggcgtgggacgttctcagtgatttctgctctgcgatgcgctgtatgccggtatggaacggccagacgctgatgttcgttcaggaccgtccgtcggatgtggtgtggccgtacaccaacagcgatgtggtggtggatgataacggcgtgggtttccgctacagcttcagtgccctgaaggaccggcacacggcagtggaggtgaattacaccgacccgcagaacggctggcagacctccacggaactggtggaagacccggaagccatactgcgctacggacgcaacctgctgaagatggacgcgttcggctgtaccagccgcggtcaggcccaccgtgccgggctgtgggtgataaagaccgaactgctggaaacgcagacggtggatttcacgctcgggtcacaggggctgcgtcacacacccggtgacatcattgaaatctgtgataacgactatgccgggaccatgaccggcggacgtgtcctgtccatcgatgccgccagccgtaccctgacgctggaccgggaggtgacactgccggagaccggcacggccactgttaatctgattaacggcagcggtaaagccggcgagcgtggccatcaccgcacaccccgcgcctgaccggatacaggtcagcaccctgccggatggtgtgragacatacggtgtgtggggactctccctgccgtcactgcgtcgtcgcctgttccgctgtgtctccattcgggaaaacacggacggcacgttcgccatcacggcggtgcagcacgtaccggaaaaagaagccattgtggataacggggccagctttgagccgcagtcaggcagcctgaacagcgttatcccaccggcagtgcagcacctgacggtggaggtgagtgcagctgacggtcagtatctggcacaggcgaaatgggacacgccgcgggtggtgaagggtgtgcgcttcagtctgcgtctgaccagcggaagcggagaagacagccgtctggtgagcaccgccatcaccgcagacacggagcaccgtttcagtggtctgccgctgggggaatacaccctgacggtgcgggccattaacagctacggccagcagggcgaacctgcgaccaccaccttccggattaacgcgcctgcaaaacccgccaccattgagctgacgccggggtattttcagataacggcggtcccgcgtcttgcggtgtatgacccgacggtacagtttgaattctggttctcagaaaaacgcatcacgaacacggcacaggtggaaaaatctgcccgttatctggggaccggcagtcagtggactgtccaggggagccggattaagccggggacggatttctggttttacgtgcgaagcgtcaacctggtgggaaaatctgcttttgtggaagccagcgggcagcccagcaatgatggtgaagggtatctggaaattttccgggggctgatagatgagacgcttctgggccaggcactgaaagagcgcattgatgcttcagcgctgcgtacggaggtcacgcaactggaagaagacatccgtcagcggatggacacggatatcgcagaagtgacccggaaaatcggggaggcggaaaacagcctcacgcagctggttgcgaaaaagaatgaggaccagacactggccatcgcgcaggtgagccagaaagtggaccgggtgagcagtgaaatctcacagactgtcagccaggggcagtcagaaaatgcccgacagatagcacaggtccgccagtacgtggataaaaaagggagtgaaattacctcgaccacggataaaaaactgggtgaccaggccgtgaccatacagcaaatccagcgggttcagtcagacacgcgcaatgagctgaatgccatgtatatgctgaaggtgcagaaaacaaaaaacggtattccctatgtggccgggattggtgcggggattgaggatgttgatggtcagacgctgagcagtattctgctgcaggctgaccgtatcgcgatgattaccccggagaatggcaacaccacgccgctgtttgtggcgcaggggaatcagctgttcatgaacgacgtgttcctgaagcgactgtttgcggtgagcatcacgtcatccggcaatcctcctacgttttccctgacgccggatggcaggctggcagcccgcaatgcggatatcagtggagccatcacggcgaataccggcacgctcaataatgtcaccattaacgagaactgtgtcatcagagggaaactgtctgcaaaccagattgaaggcgatctcgttaaaacagtgggtaaggctttcccccgtgactcccgtgcaccggagaggtggccatcagggaccattaccgtcagggtttatgacgatcagccgtttgaccggcaaattgttattccggcggtggcattcagcggtgccagacatgagcgggagaataacgatatttattcgtcatgccgcctgatagtacggaaaaacggtgctgaaatttataaccgtaccgcgctggataatacgctggtttacagtggtgttattgatatgcctgctggtcgcggccacatgacgctggagttttctgtatcagcatggtgggtaaatggctggtatcccacagcaagtatcagcgatttgctggttgttgtgatgaagaaagccactgcaggcatcacgattagctgaattttataaccccaatacgggcgccagaaatggcgccttttttattgcagaaaagcgagaggtaattatgcgtaaattatgtgctgttattctgtccgcagtagtctggctggttgccgctggtacgccagcgagcgcagcagagcatcagtccacactaagcgccgggtatcttcagacccacactgatatgccaggcagcgataatctgaacgggattaacgtgaaataccgttatgagtttacggacgcgctggggctgattacgtccttcagttatgccaatgctgaggatgagcaaaaaacgcactacagcgatacccgctggcatgaagattccgtgcgtaaccgctggttcagcgtgatggcggggccatctgtacgcgtgaatgaatggttcagtgcttatgcgatggcaggtgtggcttacagccgtgtgtcgacgttctccggggattatctccgcgtaactgacaacaaggggaaaacgcacgatgtgctgaccggaagtgatgacgatcgccacagcaacacgtctctggcgtggggagctggcgtgcagtttaacccgaccgaatccgtgaccattgatattgcttatgaaggttccggtagtggcgactggcgaacggatgcatttattgttggtatcggataccgtttctgacaacagacgccgatttatcttctgtaaatattgttatgatacgcaggttcatccgccttatggggtgaactgcgtttgaggaaacgtaaagttacactgtcctgaagcccgtggcgtcactgctgcgggctttttttattggtggaaaagtatgacagtaaaaatttctggcgtgcttaaagatggcacaggaaaaccagtacagaactgcaccattgtgctgaaggccagacggaccagcagcacggtggtggtgaacacggtggcctctgaaaatccggatgaagccgggcgttacagcatggatgttgagtatggccagtacagcgtcaccctgctggttgaagattttccgccttcacatgccgggaccattaccgtctatgaaggttccaagaccaggtacgctgaatgattttctcggcgccatgacggaggatgatgttcgtccggaggcactgcgccgttttgagctgatggtgaatgaagtggcacgtcatgccggagcgtcatcacagagtgcagcggcggcaaagaaatccgaaacggcagcagcctcatcgaagaatgcggcgaaaacctcagaaacgaatgcagctaacagcgcacaggcggcagcggcctcgcagactgcatcggcaaactccgcgacagcagccaaaaaatcagaaaccagcgcgaaaaatagcgagacagccacaaaggccagcgaaaaaaacgcaaaatccagccagacggcagcgaaaaccagtgagacgaatgccaaagacagtgaagccaacgcaaaggtgagcgaaacagcggcggcgaactcggcgaaagcatcggcagcaagccagacggcagcaaaagcaagtgaagatgctgccagagaatacgcaaaccagacagcagagccgtacagatatgttttacagccgctgccggatgtgtggataccctttaatgattcgctggatatgattacgggctattctccgggttataaaaaagtgaagattggtgataatgtggttcaggttgccagtgataaacaggttaatttcagtcgcgcatcaacggcaacatatatcaacaaatctggcgaactgaaaacggcggaaattaatgagccgcgatttgagtgtgatggcctgcttattgagggacaaagaacgaacttcttccagaacagtacagacccttcgaagtggaataagtcaacttcactggacgttacagaaacaggcacagatagtttcgggtttaattatggtcggtttgtcgtacaggattcgattgttggtacaagtaaagcgcataccattatcggactgtattcgagtaccggaggggttgatacttcaggggacgaaaagcatgtaactatatcctgtcgggtaaaaagtgaagttgataatatcgccgttcgtattttatttgaacattatgatggggaggtaaggacatcaataggagcagcaaacctgaaccttaccacccgcataattagcaagacaggtcagacaagccgtgttacagcaaggtctgttaaggatgatgcaactggctggatattttttgaggctacattaaaagcagatacaacagaaaatacggttggtggttttgtccagtattctccggatacagggcagatggttacatcaggggattatctcgatgtaaccactccacagattgaggctggtacaggcgcatcatcttttattgttacggggacggcaccggcaacgcgggcaagcgatatggtgacagtcccaatcaagaataacctttataatcttccttttacggttctttgtgaggtacataagaactggtataaaacgccaaatgtagcgccgcgtgtttttgataccggcggtcatcaaaccggagcggggatcgtaatggggtttggttcatcaggtgggtacgacggttttccgtattgcgatataggtggttcagaccgacgaataaatgaaaatgccgggctggaaaaaatgcttattggtatgcgggtaaagtccgaacggtccacatgtgtagtcagtaacggtaagttaagcagcgaaactaaaaccaaatgggaatatatccggagtacagcaaccattcgcattggtggacaaactacagcaggattacgccatttatttgggcatgtgaggaattttcgtctctggcataaagagctaacagatgcgcagcttggggaggttgtggagtgagagatttcacgttgcgtttcagtgataaagcagatttcagggcatttctcaggaaacttaactgggaagaggacgaagagctgcagaatgccgttctggttgatgagattggttttacgttcagggagacagatgtttctgatgacggagaaccagaatacacgcgaaacgaagggtactttgttaatatccgtcttcttgacgatggatttgaggattccgtgttccgtgagtgggtggttacaccagagcgcccgctcagggagtggttttaaggatagcagatggatatcacgtcgatacttcatgcgctttgtgccgtggcggtgcaggtactggctggtctttttaccggaaactgggcttacggggcgatagccggttgtacgttcttcattgcgcgtgaacacacccaggcagaatatcgctggattgaaatgttcgggcatggcaagcggattaacatgccgtggtggggcggttttgatccacgtgcatgggatgtggcaagcctgatggattttgctgtgccggtggtggcgtgtctgctggtctggctgttggttaatcgtgggtgaaaaaggtgagcagtatatgcaacgaaggaggaaacatcattgctggcggcatggaaggcatgcagggtgttgctgaaccgtgttgatacatcaactgcccctgatattgagtggcctgtgaaccctgtcagagagtaatcattgggattatgccgcagcacgtcgtgcgcaagaacgtgctgcggctggatgctattttttccctgaagcggaaaacattactacagtacctttaaccttggttttaacattctcgaaatgctctgagagtatatgtgttaagccttcttcggaatcttttgtgtttgaaaagatgcctttctgattgtaaatgcgcatcagtttttgaccgaagctattgtgcacaacgccgtcaccaagaattgtggctccgtatagagttccatcgtcagttaaggcctgcgccgcattgcgtattacacagctttttgtagatatatttccaggcaggcagtgaagaaggtaaaacatggaaatggaatcaaattgaccatgtaacgccgcgggataaggatcaaaaacatcatggctaattttatgtttaatttttgattccccagcccttgtcgatgccgcgttcaggctagcttcgttcaaatccattaaagatatcagactgctctcaggtacgtgagtaaggtaaaacccagttccaacgccaatatccagatggttgttacctaaatgttccagaaagtgtggaagaaggtgttcctttgtaggacatccccatgcaagccgatttgatactcccaaaacccaccagtcataaagctttagggtaagtggtgtgtaaattttagccccatcatctgtgttttttttcattagtttcaccgtattatagttttatttgtgaattaaatcaattatggcgatgaattacaaggggttaaatgctgccgcagcatagcgatattgaaatagcctggtatgcttcgatacagcaggagccgaatggctggaagaccgtcaccacacagttctacatccaggaattcagtgagtatattgcgccactgcaggatgctgtagatctggaaatcgcaacggaggaagaaagatcgttgctggaggcatggaataaatatcgggtattgttgaatcgtgttgatacatcaactgcacctgatattgagtggccgacttcacctgcagagtaatcaacggcgcagggatgatattttgtgcttgaagtgcctccccgaccattcagatagtcggggaggggtattgggattatacgcaatcagttttagttaaagaccgaagctctcgaaaaatctttctccaaaaccagaatggaattgattgattttgataggatctataacgtcgttaccttaaacggcaaaaccactcaaaaacaaacttaatgcattgaatataaaggattaatcatctaattcgctcaccttcttattcagcagacgagaagcgcgccagtaaaccagcaacatcaggcccattacgatagtcagcgtaatgctggtggctgcaccaaacggccagtcacgaatattgaggaactgtaccttgatgacgttaccgatcagcaggtttttcgcaccgcccatcaggtcggacacatagaacaggcccatcgctggcagcatcaccagcagacatccggcaataattcccggcatcgttagtgggataatgatgcggataaaggtctgcaacttgctggcaccgagatcgcgcgccgcctcaagcaacggcttatccagtttttcgatactggagtacagcggcatcaccataaacggcagcagaatgtaaaccagaccgataatcaccgcactaggcgtgaacatgatgcgaattggtgtatcgataacgcccagccagagcaaaaactcgttgagatagcctttggtgctgaggaaaattttcagcccgtaaatacgaatcaatgagttggtccagaacggaacaatcagcagaaacagcagcagcggacgcaccttgtgtggcagcttcgccagaaaccaggcaaaaggatagcccagcaccaggctggcgagggtggcgatcagcgccatattcagcgagtgcaatagcacttcaaaatagagcggatcgagcagacgcgtgtagttatccagcgtaaagaccattttgacgaaactggcgtcgtcgcgggtcaaaaagctggtgccaatgatcatcaggttgggcagaaagacaaacaacacaagccaaccgacaatagtgacaatcactacattctggaacttacttgtgttcttcatcagccagtacgacctcccagctttctacccaattaatggccattttttggtcgagagagtggtcaaagtcaggatcgtcttcattgaagaattcgctgaccatcaccatcttgccattttccagctcaacaaccgactccagcgtcatgcctttgtagttacgctcgcgaacgtaaccaatcagcccttcggcgtggttgtcgtcgttaatctcttcaacacgtaagtcttccgggcgcagcagaacatgcagtttttgccccggttcaacggcgaagttaacgtagatattacattcgcggccttcaacgttggcgcgtacgcgctgctcgtcgagacgttcgatgacagtggcgttaaacatattgatttcgccaataaacccggcaacaaacaggtttttcggctcttcgtagatttcacgcggcgtgccgtcttgctcaatgcgaccatcgcgcatcaccacgatcctgtccgacatagtaagtgcttcttcctggtcgtgagttacgaacacgaatgtaatgccaagcttacgctgtaacgctttcagctcgttctgcatttgcttgcgcagtttgtaatccagcgctgagagcgactcatccagcaacaacagacgaggcttgttaaccaccgcgcgggcaatggcgacgcgttgctgttgaccaccagagagctgatgcggtttgcgttgagcgaaggtttccagctgcaccatccgcagggcttccatcacgcggggcgtaatttcagcagcgggggttttttgcatgcgcaacccaaaggccacattttcgaacacggtcatgtgggggaaaagtgcgtagctttggaaaacagtgttcacgtagcggttttccgccggaacgtgggtgatgtcctcgttatccaacatgatgcgtccggaatcaacagtttccagacctgcaatcaggcgaagaacggttgttttaccgcagccagaagggccaagcagcgtgaggaactcgccattgttgatagtcagatccagctggggaatgacctctttaccatcaaagcatttgcgaattcccgccaattgcaccagcggtgaaagcgaactcggttgtttattcaattttttactctgtcccatgtaaacgcaacggatggcttaccgatgcggggtttgtggttaaccaccttggtgactcttaatgagggcggtaattctacggcaaaccgcttgaatcgccaatctttgttgtgaattactggcttagctttatattcattaaggtaatgctgataaatattcccgcttgcaggggtaaaagtgacctgacgcaatatttgtcttttgttgcttcttaataatgttgtcacaaaaagtgagggtgactacatggataaactacttgagcgatttttgaactacgtgtctctggatacccaatcaaaagcaggggtgagacaggttcccagcacggaaggccaatggaagttattgcatctgctgaaagagcagctcgaagagatggggcttatcaatgtgaccttaagtgagaagggaactttgatggcgacgttaccggctaacgtccctggcgatatcccggcgattggctttatttctcatgtggatacctcaccggattgcagcggcaaaaatgtgaatccgcaaattgttgaaaactatcgcggtggcgatattgcgctgggtatcggcgatgaagttttatcaccggttatgttcccggtgctgcatcagctactgggtcagacgctgattaccaccgatggtaaaaccttgttaggtgccgatgacaaagcaggtattgcagaaatcatgaccgcgctggcggtattgcaacaaaaaaacattccgcatggtgatattcgcgtcgcctttaccccggatgaagaagtgggcaaaggggcgaagcattttgatgttgacgccttcgatgcccgctgggcttacaccgttgatggtggtggcgtcggcgaactggagtttgaaaacttcaacgccgcgtcggtcaatatcaaaattgtcggtaacaatgttcacccgggcacggcgaaaggagtaatggtaaatgcgctgtcgctggcggcacgtattcatgcggaagttccggcggatgaaagcccggaaatgacagaaggctatgaaggtttctatcacctggcgagcatgaaaggcactgttgaacgggccgatatgcactacatcatccgtgatttcgaccgtaaacagtttgaagcgcgtaaacgtaaaatgatggagatcgctaaaaaagtgggcaaagggttacatcctgattgctacattgaactggtgattgaagacagttactacaatatgcgcgagaaagtggttgagcatccgcatattctcgatatcgcccagcaggcgatgcgtgactgcgatattgaaccggaactgaaaccgatccgcggcggtaccgacggcgcgcagttgtcgtttatgggattaccgtgcccgaacctgttcactggcggttacaactatcatggtaagcatgagtttgtgactctggaaggtatggaaaaagcggtgcaggtgatcgtccgtattgccgagttgacggcgcaacggaagtaagcaaaaagggatgcggcatgtgatgccgcatccggcttaaatccaaacttacccttcgaagaaccagtatccgctattgaccagcgccgcgagcatcgcgaggaatgacggatcttccagcgcatcgccaaaattctccgcggtcagcgcaatgttgctggcgagtgcatccagtgccggacggtgcggggaatcgattttctcaccattggcatacacgtcgtcgccaatgcgcaatacgcgcagaccccccaggcgcaccagcacatcaccttgtttcagcgcatcgtagatttcatccggctgataaggcggctctggcggcgcgatatccagttcatgacgtgactgggatataaactcgccaaaccattgcttaaagtgttccggctggttgatcaattcgagcatcatctcacgcagtttatccatctcttgcggcagaacgtccgcaggatgagcgcgaggtggaacatcaggatcgctgtagtagttgccgcccagttcacgttgcagcacataatcggcaaatccgctaatcagttcccgcgtattcggcgcgcgaaaacccacggaatagttcatcgcattttccagcgcgtagccttcatgcgggaatcctggcggaatataaagaatatcgccaggctccagctcttcatcgatgatggcttcgaacggatcgacctgtaacagatccgggtgcgggcagtgctgtttcatttgcagcttttcacccactcgccagcgacgacgaccggtaccctgaatgataaacacgtcgtactgatcgagatgcgggccgacgccgccgcccggtacagaaaaagagatcatcagatcatcaatacgccagtccggtagttcacggaacggtcgcattagcgcagcggtcggctcatgccagtggttcactgcttgcactaacaatgaccagttagtttctccgagatgatcgtagctttcgaatggaccgtggctgacctgccatttgccatcctgatgactgaccagtcgactgtcgacttcgctttccatcgccagacccgccaactcgtctggagagattgggtcaataaaattattaaagccgcgttttaacaccaccgggcgtttctgccagtgacgttcaagaaaatcgggccagttaagagtgagttggtattccatgttaagcatccacaggctggtatctgcaaccgattataacggatgcttaacgtaatgcgtgaagtatggacatattttatcaattagtgttttttgccgtttcataatgtttcagattgttcactatgtttttgattataaacagatttgtgattttccttgttccagcttgtttcacgttgtagccctttgtgcaacgatcggtgtagttaatggtgtagttaattgtgatgaccggaatcaaaattatgagcagagcacttaacaaactgagcgatacacagctgaggaaaatcaacggcacacccgcccaaaaaacagcctttcttaatgacggtggaaacctgagcgtcaggcattcaaccagcggccttttaacctggtatttcacctacagggccggaacgggaaggggagcacgaccggaacggattaagctgggaaattatcctgatctgagtctgaaagctgccagggaaaaagcggcacagtgtcgcgcttggcttgctgaggggaaaaatccacgtcatgagatgaattacaccgtacagaaagcgttaaagcccgtaacggttggcgatgcgcttacctactggcttgagtcttacgtaaaggaaaaccgcgtggattatgccgccctgaaaaagcgccttaataatcacgtaatacagcacattggtgctatgccgctggataaatgcgagctacggcactggctggcctgttttgaccaggtggcaaagcgaacgcctgttactgccggattcttgctacagacgtgcaaacaggcgcttaagttctgccggaggcggcgctatgcaatcagcaacgttcttgatgatatgagtgtggcggacgttgggaaaaaaccggatataagcgagcgtgtcttaagcaccaaagaacttggcgaattattgcaggcactggacaaaaaaatattttccccttactacgtcgcactaatccgcctcctgattgttttcggatgccggacggtagaactgaggttatcggagatcagcgagtgggattttaccgaaatgctctggaccgtgccgaaagaacacagcaaaacgaaggtggcaatattccggcccataccggaagcaatactgccgttcgtcacgcagctggtggagcagaacaggcacacgggcttattgctgggggaagtgaaacaggaaacaagcgtgtcgcagtacggcagattagcgcacaggaggctaaaacaccctcactggtcactgcatgacatccggcgcacctttacaacgatgctgaacgatttaggcgtggatcctcacgtcgtggagcagcttacaggtcatcagatgccagggatgcaacgagtctataaccattcccgttatctggatgcgaaacgtgacgcgctggatatgtggacggagcggttagggatactggcgggaacacatgaaaacgtaaccacattgccaatagccagagaaatataattttttttgcgatttttcaggatgcggacaacgtgaaacaacgagacacaacgacgaacaacaaggaacaaaatggaacaacgggttaaaaatcagccatcgtaataaccatttgatttttataggtgtactgtttttttatacactggcgaatcactcttaaaaatatgtaaaaaaggcgtaaaagtaaaattttatgcctttgcatcataatgaattaaaagagtttttattctcatttcccctgcttctgtaaaacgaccgccgccagtgtttgccattccacaaacaccctgacacaatccgacacaacccaacccaataatccacccaatgactctttaagaaacaacaaagggggaattgtgttaagcacagatcgctttatacgtgaaaaagaatgtcagcaacttacaggcctgagccgctcatgtcggtaccgcctggaaaaagccggacaattcccatcacggcgtaagctgggcggtcgttccgttggctggtctttatccgaagttctggcatggaaggacagctgcgaggcagttcactaatcaggctggcggcacacagccgccacccatccactaatacagagatctaaccatgaatactggatattctcccgaacaagggcggggcttcgttcgtcctgaaaaacagaatctgcaaaattttgccgaaattattccggttatttccggccttactggcgggagtgaaaccaatattgttaacgccagagcgttgcagatgtttgatgataaaaagggagtaaatttaacttacacccctgacggcaatcagaatatgagcattatctctgagtcaggtttctacaaactaataaaaacaaaaagcgccccgttgccggagcgcctttgtgaacaattaacctactgcgcaaaaaatgaatctgagcagtgggattatatcaaccatgtggagaagcgccacaattgccgaataacgggcaaaacaaaggccacccgctacggtggcccctcgacacaagctacacgttatccccaacgcatgagcattgccaacaatgccacatttgcggctggtgggcaatgcaatcagtcaggttcagttcgttgccatacctgcaatgagcgcttttccctgtactctttaaggaattgctcaagggcaaaagcacatggcgcgaatctttctgattcatgctctatctttctgcgccgtcttttccgtgccggtgataatgttttggtcaattctttatcggtcattgtgttgtcctgcatagcaatgcgccgtagttactcacaccacggcgctggtgatggttactcctgctctttggccttgcggcgctggcggcgtttgatctcgccttgcattgacgcaatgatgaattgtgatgtgctttcgcctgattctttcactgattccatggcgtttactatttcgtgtggtacacgagcctttagagcttgtgattttgcgtttgttgtacccgttgccatttctattcctctgttggattggtgggggacagtatacacagaaaaagcacaaataaaacccttgacgtgggccacacctaaagcatatagtgggccacaccttgagattatcaaggtgcataaatgcaaagccccgcaagtgtcgttaccactcgcagggcttctaaccaccaacgatagcgaaagtatcgaggtagctatgttaaatcataccacacacccgcaagggcgggactcgcacaacctgaataaatacatctggcgttttatcgccctgagcacggcacaaccgcgcgtgattaccattgaggccaccagcgaacaggaagcacgccagcaatctccggctggctgcgtgatggtatttgctgcccgtattcgtcagggggtaggcttatgagccaggaaatcacactacaacaggcagcagaacgcgcccaccaaatcgaagttatttgcgcactggcagaggattaccctggcatgatgaccgacagcgaatcaggggcaatcatcggcttacttaaacgccttagcggtgaggtctgcgtattcctgagcgatgaacaggaaagaagaacgcttatttctaacgaaaaaaaatgcggaggggtacatgtgcaataaaaccacaccggacgcagccgccgccgcactcactacgctgatgcacgcgcttattgatattgaatgcacggcagagcttgcgcagggagaagaacagaaagaccggacacagttcgccctggaatgtatccgatacatcgcaacgcggtcgctgaatgacgctaaaaatattcttgttgctgattgtgaaaatggggggggttatgcgtgatgatcgttttaattccctgaaacaggaattttccggcgttcctgatgatgcggctgatgcgctttcgtcaatgccagaacttattagagcggcttttttcttactttccacgagagaatataaatcaacggggcttgatgtactgaatatcgccgccgattatgctgatttcgtgacagaggttattttaagaaaaacgacggacggggattaatatgcgtgatatttaccacgaaacaatagaccgcgcatttcttgcactttctcacagtgaaaatatgttggaaatattgcgcatatgtcttgaaacgcttggagataatgaacgtgataaacagaaatcaaggattgtcacggcattaataacgcttcttgagcctgtaataaatgagttgcaggaaatagagacattacacgaccagtataaagcgccccacaccggagaataaaaataatgaaacttaaatattctggcttaactgccagtggcaaaactcgcactaaattcatgcgcggtgatatttaccgcgataagtacggcggcacggtaatgattaagggcgtggaggaacggcgcgtaacctaccgtcgtgaaggttacgaatatgattgcgtgatgcctgtttatcagttccggcgtgatttttctctggtacagaccgcgccgcataacgtgtccaccagcaacgccagggcacgggcaaacatccagaagctgaaaaccatgattaacggattcaggggtaaaaaatgaaactggcaccgaacgtaaaacagcagtcacgcggcataaaacacaaagaaacagaagtcattatttttgcgggtagtgatgcctggtcacacgcaaaacaatggcaggaacatgacgcgcgtatggccggagataatgagcctcctgtgtggcttggggagcagcagttatccgaactggataagctgcaaattgtgccggaaggcagaaaatccgtgcgcatattcagggccggatatcttgcgccagtaatgataaaggcgattggtcagaagctggcggcggcaggcgtacaggatgcaaatttttaccctgatggtatgcacggtcagaaggtggagaactggcgcgaatatctggcccgtgagcgccagaatctttctgatggtctggtcattgagcttccggtaaagcaaaaggcgcaactttcgcagatggcggacagtgagcgcgcgcagctgcttgccgatcgctttgatggcgtttgcgtacatcctgaaagtgaaatcgttcacgtatggcgcggcggggtatggtgtccggtcagcacaatggagctgagccgcgaaatggtggcgatctattcagagcacagggccactttcagcaagcgcgtaatcaataacgccgtggaagcgttaaaagttattgccgaaccaatgggcgagccgtccggcgatttgctgccgttcgccaatggtgcgcttgacctgaaaacgggggaattttccccgcacacgccggagaactggatcaccacgcacaacggcattgagtacacgccaccagcacccggggagaacatccgcgataacgcgccaaactttcataaatggcttgagcacgcagccggaaaagacccgcgcaagatgatgcgtatatgtgccgcgctgtacatgattatggcgaaccggtacgactggcagatgtttattgaggccaccggagacggcgggagcggtaaaagtacattcacacacatagccagccttctggcagggaaacaaaacacggtaagcgctgaaatgacatcgcttgatgatgctggtgggcgtgcgcaggttgtcgggagtcgtcttatcgtcctggcagaccagccgaaatatacaggcgaaggaacgggcatcaagaaaatcacgggcggcgaccccgtggaaattaacccgaaatatgaaaagcgttttacggcggtaatcagggcggtggtgctggcaaccaataacaatccgatgatattcaccgaacgggccggaggtgtggcacgtcgtcgggtgatattccggttcgataacatcgtaagcgaggcagaaaaagacagggagctaccggaaaagatcgcggctgaaatccctgtcattatccgccgcttgctggcgaactttgccgaccctgaaaaggcacgggctttactcattgaacagcgtgacggtgatgaagcactggcaataaagcaacagacggatccggttattgagttttgccagttcctgaattttctggaggaagcacgcggcctgatgatgggcggcggtggcgattcagtgaagtacacgaccagaaacagcctttaccgcgtctatctggcgtttatggcgtacgcaggcaggagcaaaccgctaaacgtaaatgactttggcaaggctatgaagccagccgcgaaagtttacggacatgaatatattacgcggaaagttaaaggagtaacgcagactaacgcaataacaacagacgattgcgacgcgtttttataatttgttgcaatggctgtctaccctgtctacctgagtaaagaaaaatacatttaattcagtacattaacttgggtagacagcctttttttactgtctacctactatctaccctctctacctgattttacctgaatcagacagggaggtagatacggggtagatagtggataaaagcactctaccccactgaaagccgcgccattactggcatggtggccagtaaggtagataaggtagacaaggggaggcacaactcaaaactttttaaacgagggggtaaaaataaaaatgcgcacatcaggaaaacttaataatcagaagaagcagcataaccgcgccattgaccttacagagcactggctgagagtggcgataaaaatcatcgaccgcaacacgggggaaggatacgcgaaagcacatcccgacctgataagcgcattcatgaccacagcggcggcaaactttgccacgctgacagaatgggagattgccgaagcggaacaggtaacaaccatcaacgttaaaaccggagaggtggaatcatgacagcacagatagcagcttacgggcggctggtggacgacccgcaggtaaaacagaccagcaagggcacaccaatgacgctggcacgtatggcggtatcgttgccatgtagtcaggcgcaggatgggcaggctacgttatggctatcggtgatggcatttggtaagcaggccgacttcctggctaaacatcaaaaaggcgacgttgccagcgtatccggcacgatgcaggtcagccagtggaccggacagaacggggaaacgcggcagggttatcaggttattgcagacagcgtaatcagtgcccgtgcggcacgtcctggcgggaacagacgcaaaaccacaggcacacagggtaatcagccaccagcgggaggcgatgacccttacggtgatgatattccgttctgagggggtgaggatggtacatgaccgcatagcggaggaactcgaggcaaaaggcttttaccggagggcggcggcacgatggggtgaagtcatgcaactggtggagacagacaaggaacggcatcaggttacgatgcgacggctggaatgttccaggaaggcacagaggccaccggagccgccaacggagaactatgcagacctgagaaatgcagtaaatcgcacttacgcagacatggggctgagcaaattagcagagtaggaataccagaaccacaccacacagccggagcaatccggcttttttgcgcccaaaaaaagcccgataaggtcagaggtggcttatcgggcttttgcatatgaggttttttggtgcactgacacacatgatcgggataaacatttcataatttgcaacgcaactcaatatcattgctcaaaatgcaatcatgattataatcataactggatgaacatccagttatgattttttaagtcaaagaggaatttcttactatggctgaagagaaaaaaggcggtgtttcggtgtacataagccccgacatcgtgaaggcgctcaaggaacgccaccagcagaacgtaaaagcaggcattgcggcaggacttgatccgctggcgatggttgagccgtcaacaggctggcaggtacgcgcctatttacgcgcggcgcagggtatgaatcaggttcacgggggtgaataatgacagtaaaagcaatggcacttaacactaaccagctttttgcgtacctgaatcgcggggatattgcggaatttaaattcagtccgctgtttaccacgctgtttttcccgaacgtggcgacattcagcacgcaaaacatcatgctggataccctggacattgaagaagtcaccatgtcggcgttttgttcgcctatggtgggtagccaggttcagcgcgataaagggtacgaaaccagcacgattaaacctggctacatgaagccaaagcacgaaatcgatccaacgaaaaccatcatgcgcatggctggagaagatccggcacagcttaacgaccctacctatcgccgtatgcgcctgattactggcaatatgcgccgccagataaacgccataaaagcgcgcgtggaatggctggcggtaaatgcggtaacgaccggaaaaaacatcattgagggcgaaggcatagagcgctatgaaatcgactggaagataccggaaaaaaacatcatagagcaggccgacgggaaaaaatggtcagagcaggacaaagaaacccactatccaatctatgatatcgaactatacgccgatcaggctggttgccccgcaaacgtcatgattatgggcgctgaggtatggcgaacgttacgcagctttaaaaaattccgtgagctgtacgatctttcccgtggttcagaatccgccgccgaactggcctgtaaaaacctgggcgaagtggtgagctttaaaggctatcttggtgatctggcccttatcgtctattccggcaaatacactgacagcgatggtaccgaaaaatatttccttgagcctgatttgctggtcctaggtaacaccaacaataaagggctggtggcctatggtgcgataatggatcaggaagcggtaagaacgggcgcaacacaaaacatgttttacccgaaaaactggattgaggacggagatccggcgattgagtacgtgcagacgcacagcgcaccgcagccggttccggcagatattcgcaaatttgttactgtcaaaattgcttaacgggggattctatggacactccatacattgagttatttgcaggcagtcagcaggtcgccacgacgctggtacattttgccgctgatgctggcgttattcaggaatttaccccgctgatgctggcggacaatggcgagtttaagccgtgggatggtaaggaatctggcaaggctgtttatctgacctcgtaccctgtggacacgtcaaagcagaaatcagcacagtgttacaagacggggatattcaatattgccgccgttaactggcctgagagcgtcgacaccgatgcgaaaaaatgcgccgcctttgcgggttctggcgtatccgttcagccgctggcccgataagcagggggaacgatggcaacgaatgaaagcatcatgacgctaccgctggcgagtaaatttaaagccgaagcgcgggcaatggctgacagaggtttatcaacctatgaggccgtatatcaactaaacaaactggaagagcaggacaagccgcgcgctgatgcgattatggcgcttgatgaatctggcgactatcagccgctgttacgtgcaatggcaaacgtgccttgtatcgatgttggtacggctaaaagcatccttagcatgaccatagagcaggaacgtccgaaggttgcgccggaacttactgcagcctttgaaaactttatggacatgcacagcccgcaagccgtatcagctggcatggcatacgatggcagaaaccagggcgatgacggcgacatcgatcgcatactgaaaaccatctgagacaaggccggagaaatccggctttttttatgggtcctttccggcatatggacccgttacggggcggcgacctcgcgggttttcgctatttatgacgtttttccgtgaaggtgacaccaccaccacttgattaatatttaaccatgcagttaaggtaacattatgattgataaagcttgttttgtaagtcagcaggaaatagctgaacatttcaaggttaacagaaccactattcgcgcatggaccaaacaggggatgccgtatcttaatgcggatcgcggaaagtctggcggttatcacatcgggcatacattgctttggtcttcaggtaaaagccgtcttgaggccatcagatatcacgtagaaaccagtgcgctggaaaaaattatgtttgccaggctgctttcatctgagcgtgacgagtactccagtgaagaaacagaacatcgatttgatgaaggtttgcagatttacggctattcaccggaagatgtgagcaaggcacgaaataaaatggctggctttctggctgggtggcgtcatgccgtaagcgttcgccgtgccagcatggagcaatcagccgatacagaacagtaaagccgataacttgttaatcactcgcagcaatgcatgtgatttgtgcacactttcggttaactggttcgatgtccggttttagtgtctgttttttgcgcatgtccggttcatggaaagcatgtttttatatttttcatatggttaacttgcagagaaaccggacatggatcccgaaaaattttcataaatagtgaaaacgcgcgaggtcgccgccccgtaacgggccataattccaggaaggacccgacgacaccagactatcagaacgatgggggcacaatgacagaagccgaaatactgcgattaatccgccgcgttgccggaatcagccagcaggccgacgaacagaccacgcagccggacagcgtgaccgccgaaaattatgttcgtgtggttgctgaggtgattcgccgtaatggtatccagcttaatgatgtggatatgcgcaacatacggatccgcgttcttgaaatgctggcctacaatcgccgcgtggcactgtatcgggaaacggagaaaattacgtaccactggaagaagccggagcggttgcggcggtaactggttgatattttcgaaattcgccagcggcgaacatcggggaaaccagcctaacccgttgatattttcgggaacctcaaattgaagaggtcggaaacataacccgtcatattctggatgctgataattaccacgcagcccattaaggcctaacccgttgattcttccacaatcccccattgggggaggctgggcggcctgctgtgggcttttccaccattggtggaaaggcgcacatctggatcatcattacggtgatcaagggtatgtaaaacccaccagcctgattgacatttaaccggaaaaaagccaggtagccccgttatggggatccccatatcgacattaacgcccctcatgaattggcgcgcttccccctggaaagatgacccgcctgtatatttcttgtgtctatttgttccacgttgtttcatacagtgcaacgatcggtgtagttaatggtgtagtcaatttgcgatttttagcactttttgcagtgcaaatcatttaattaaatcaatggcttgccttgatgtagtgataaaaggacatatttattcatctttcggtgcagaatgctggcgaccaaaaatcacttccatccgcgcaccgcccagcatgctctctccggcgacgattttaccctcatattgctcggtgatttcgcgggctaccgccagccccacaccttgcccagggcgtaaagtatcaacccgttgaccacggtcgaaaatgacctctcgcttgcttaatggaataccggggccatcatcctcgaccacaatatagagatgctcgtcggtttgccttgcagaaatttcgacaaattcgaggcaatatttacaggcattatccagcacattacccatcacctcgacaaaatcgttctgctcaccaacaaagctgatctctggcgaaatatcgagagagatattgacccctttgcgttgatacactttgttcagcgccgaggtgagattgtccaacagtggggcgaccggatgcagctcgcggctaagcaatgtcccgccgcgcatactggcacgatgcaggtagtasccaatttgctgtgaaatgcggctgatttgctccagcattaccggctcagcatcactgacgctcatcttctcactacgcagagaacgcagcgtactttgcagcaccgccagtggcgttttcagactatgggtcaggtcggtgagcgtcgtacgatatttgtcgtaacgttcgcgttcactttttaacagtcggttcaggtttcgtaccagactggtcagttctcgcgttgtggctggattgagcaattcacggttatgttcttccagttcgcggacttcttttgccagggcttcgatggggcgtaaactccaccaggcggcgacccacagcagcgggatcactaacagcagattggctgagagcacatagataaaccagctccagaccatataggaactttttagctccaccggaatggtatccaccaccacaatggttaactttggcatccgcgatgttgccgggtagacgtttaccgccaccgagtgggtcatctccgcgtcgtcatcatcttcccgcacttcctgcaactgttgctgtatcgaatgatctccactcagcaagaggctggtatcgttaacatccgcttcaatttcatgaaaaccattcgatttcagccagtcaggctggatcatcttcatcagccagggcacgtcacgttgcgcccataaaagctgcccgttctcatcataaattagtgtcatcgtggggctttgcttgtcgatattttcgggtaactcgacatgcaacttattgttttcccacttcgcaagggtatagaacagattgctctcgccacgtaacagccgaaacgtggttttatcgaaactgacgctataaccgatcagcgcaaccattccgtaggcaagcgaaagcaccaatactactgctgccgttgctaacagaaaacgtacccgcagcgagagcgggaaaaaaagatgcagtaattttttcatcagcgcaattcgaacagatagccctggccgcgaacggtggtaatcacttcttgcggatattgtgcctgtatttttttgcgcagacgtcccatcagtacatctatggtatgactttcccgcagctccgcatccggatagagttggagcattaacgaatctttgctcaccactttgccattattgcgtatcaacgtttccataatggtgtattcgaacgcggtcagtttgatcacttcgtcattaatagataattcacggcgggagagatcaacctgaaacgggggtagcgaaatgacctgtgaagccagaccgctattacgccgcattaatgcctgcattcgcgccatcacctcttcaatatgaaacggtttagtcacgtaatcatcagcaccggcacttaatacttcgactttgtcctgccagctttcacgggcggttaataccagaatcggcagtgaaacatcattgctacgccagcggcgaatcagtgacagaccgtcctcgtcaggcaaaccgagatcgacaatcgcaatatccggtaaatgttcattgagataataatcggcttctttggcatcttctgcatcatcgacctgatgaccagcatcctgaatctgaactttaaggtggtgacgtaacaacgcattgtcttcaacaaccagtacgcgcatttttatttctccctgtcttaattattaaaatagtgtaacgcgattatgtggttatgggggtaaacattaaataaaccagcgggggaggggaggtaaagtgaaaaaataaaaagcggataatcttaataagcaggccggacagcatcgccatccggcactgttttgaggcttatttcagctcatcaaccatggtgatggcgcgaccaatgtagttagccggcgtcatcgctttcaggcgggctttctcttcttctggcaacgccagaccatcgataaactgcttcatgccttcggcgtcaacgcgcttaccgcgagtcagctctttcagcttctcgtacggtttttcgatgccatagcgacgcataactgtctggattggttcagccagcacttcccagttgtgatccagttcatccagtagatggtcacggttcacttccagtttactcacgcctttcagggtggattgatacgcaatcagcgcataaccgatacccacgccgaggttacgcagcacggtggagtcggtcaggtcacgctgccagcgggaaactggcagtttgcttgccaggtgctgcaataccgcgttggaaagccccaggttcccttcggagttttcgaagtcgatcgggttaactttatgcggcatggtggaagaaccaatctcaccagcaatggttttctgtttgaagtggttaagggcgatataaccccagacgtcacggtcaaagtcgatcagaatggtgttgaagcgcgcaacgcaatcaaacagttcggcaatgtagtcgtgcggttcgatctgggtggtgtacgggttccactgaatacccagcgaggtgacgaactcttcgctgaactgatgccagtcaacttccgggtaagcggcgatgtgggcgttgtagttaccgacagcgccgttgattttgccgaggatctccacctggttaagctggcggtactggcgctccatacggtaggcgacgttagccatctctttaccaatggttgacggcgtggctggctgaccgtgggtacgggacagcagcgggatatcgcggtactgaacggcgagatctttaataccatcaatcagttgacgccagtacggcaggatcacttcatcacgcgcggttttcagcattaatgcgtgagagaggttattgatatcttccgaagtacaggcaaagtggatgaattcagaaaccgcatgcagttccgggatctccgccactttttctttcaggaaatactcaaccgctttaacgtcgtggttagtggtacgctcgatggttttgatgcgtgctgcatcttcttcgctgaaactggcgacaattgcatcaaggtaaccgattgcgtcggcagcaaaagcaggaacttccttgatcgctgcgtgcgcggccagtttttgcagccaacgtacttcaacttgtacacggaatttcagcaaaccatattcgctgaaaatcccgcgcagcgcgctgactttatcgccgtagcgtccatcgacaggggaaacggcggtcagtgaggataattccatagatcacaactccggggttaaatgagcaagaatttgttttgcctgagtggtcaggcgattacgagaaaacatcagttgcagacgtccgccgccgacctggtgccagagcacggcggcgcgaatgcctgccagcagggtagcgcgaactttcgcctgcacttgtgggctttgcagtacagcaggggaaccggtgacctgaatgcgcgggccaagcgggctaatcacatcaacatagatagcagccatcgcgctcatcagcgtttcggactgtaaatcgaagtgttcgagctggcgttgcaggccgttgatccggttgcccagagtgtcgagcgcacctttcgctgaggagagtttgcgctcaagcaccatcagactgagtgtgtagcgggttaattcggcgtttaagccctggcgactgctggcattgagtacgccgagcaaggtttccagcccgacgcgcaggttggcttcgctaccgccaaaaaccgccagcgttgagctggggttcatatcgataatactgttgagtgagacgtgtagcgcatcgccatcacaatgcccctggtgagcgagttgttgcaccaggcgtgccgactgacaaataccggcaagggcgagggtgatgtcatagtaattctttgccacgttcactgcttccttgttttaagtaaagataataatcagaccggcagcggcagacgctgctcaataataccgccaccgaggcacacttcaccgttatagaaaacggcagactggcccggcgtcacggcggcaaccggctcatcgaaaatcacttcaatgcgatcagcgtccagcgccttgacggtgcacgggatgtcggtctggcgatagcgggtttttactgtgcaacgcatagtaccggtgaacggctcgcgatcgacccagtgcagctgctgggcaatcagaccgacagacatcagacgcgggtgttcatggccttgcgcaacaatcagaatgttgttttcgacgtctttatcgaccacataccacggttcttcggtgccgtctttggtgccaccgatacccagacctttacgctgaccgagggtgtgatacatcagcccctggtgctcaccaatttcatcgccatcgacggtaatgattttgcccggttgcgccgggagataacggcccaggaacttgcggaatttacgctcgccgataaagcagataccggtagagtcttttttcttcgcggtgaccagaccgagatcttcagcaatcttacgcacctgcggtttttccagttcgccgaccgggaacaggctttgcgcaatttgctcatggctgagcgtataaaggaagtagctctggtctttattgctgtccaggccacgcagcaggcggctcttgccatcnacatntgccctacgtacgtaatgaccggtagcgatataatcggcacataaatcttcgncggcaaattcgaggaaagctttaaatttgatctctttgttgcacagaatatccggatttggcgtgcgaccggctttatattcggcaaggaacagttcgaagacgttgtcccagtactcggcagcaaagttaacggtgtgcagttcaatgccgagcttgtcgcagacagcctgggcatcagccagatccgctgccgctgtgcaatattcctcaccgtcgtcttcttcccagttcttcataaacaggccttcgacctgatatccctgttgttgcaacagccaggcagaaacggaggaatcgacaccgccggacatgccgacgattactttttttgcggtttcagacattggatcactcacgacattgaacttcaaggcggcgtattctatcacgcagccttttagatgacaccctttgtaaaaggccagttaaaatcgccaatcatctccagcggatagcgttgcccgctttgataacaacgaatactttccgccaccagcggcgaacgaagatttgacgcctgtaaaatttcttcggcgctgacccaacggcagcagtcgatatcgctgtcatgaggctgcgtcgggcatatttgctcaagctcaatggcaaagaggaaacgcaaaaacggcgttttatccggcgcaatccactgatgcatacgaataaagtgttgcggctgcgcgctgatgccggtttcttcccacagctcacgggcggcggcttccactaaggtttcatcggcttccaggtgcccggcaggttggttccataacgctttaccattaatcgtctcttcaacgactaaaaatttgccttctgcgtgcaccacgcaggcaacggtaacgtgcggtttaaacattttgcatccttaatctgtcgcgtctcgccattcgccattggcaagattatccaaagagtaatcccccatcgcatagcgaatcagtcgcagcgtggggaaaccaacatgggcggtcatgcggcgcacctggcgattacgtccttcatataaggtgatcttcagccagctggtgggaatacttttgcgctcacgaattggtggattccgcgggccataaccacgcgggttcttcaaccagctccgcgcctgcgggcagggtagggccatcatttaaggttacgccattgcgcaaggcttcaagtgcgtcttgtgtgggaataccttccacctgcacataatagatttttccggtgcgtttacccggctgggttaaacgcgcctgcaacgcgccgttattggtcagcaccagtaacccttcgctgtcgcggtcgagacgacctgccgcatacaccccctgaaccgggatgaattcttttaatgttttgcgtccggcttcatcggtgaactgcggaagaacatcgtagggtttattgaacaggatcacacgcgtgggctggttttcaggtttacgcctggtagaacgttgcgagctgaatcgcttaacctggtgatttctaaaagaagttttttgcatggtattttcagagattatgaattgccgcattatagcctaataacgcgcatctttcatgacggcaaacaatagggtagtattgacaagccaattacaaatcattaacaaaaaattgctctaaagcatccgtatcgcaggacgcaaacgcatatgcaacgtggtggtagacgagcaaaccagtagcgctcgaaggagaggtgaatggaaagtaaagtagttgttccggcacaaggcaagaagatcaccctgcaaaacggcaaactcaacgttcctgaaaatccgattatcccttacattgaaggtgatggaatcggtgtagatgtaaccccagccatgctgaaagtggtcgacgctgcagtcgagaaagcctataaaggcgagcgtaaaatctcctggatggaaatttacaccggtgaaaaatccacacaggtttatggtcaggacgtctggttgcctgctgaaacccttgatctgattcgtgaatatcgcgttgccattaaaggcccgctgaccactccggttggtggcggtattcgctctctgaacgttgccctgcgccaggaactggatctctacatctgcctgcgtccggtacgttactatcagggcactccaagcccggttaaacaccctgaactgaccgatatggttatcttccgtgaaaactcggaagacatttatgcgggtatcgaatggaaagcagactctgccgacgctgagaaagtgattaaattcctgcgtgaagagatgggcgtgaagaaaattcgcttcccggaacattgcggtatcggtattaagccgtgttcggaagaaggcaccaaacgtctggttcgtgcagcgatcgaatacgcaattgctaacgatcgtgactctgtgaccctggtgcacaaaggcaacatcatgaagttcaccgaaggcgcgtttaaagactggggctaccaactggcgcgtgaagaatttggcggtgaactgatcgacggcggcccgtggctgaaagttaaaaacccgaataccggcaaagagatcgtcattaaagacgtgattgctgatgcattcctgcaacagatcctgctgcgtccggctgaatatgatgttatcgcctgtatgaacctgaacggtgactacatttctgacgccctggcagcgcaggttggtggtatcggtatcgcccctggcgcaaacatcggtgacgaatgcgccctgtttgaagccacccacggtactgcgccgaaatatgccggacaggacaaagtaaacccaggctctattattctctccgctgagatgatgctgcgccatatgggctggactgaagccgcagacctgattgttaaaggtatggaaggcgcaatcaatgcgaagaccgtaacctatgacttcgaacgtctgatggaaggcgctaagctgctgaaatgttcagagtttggtgatgcgatcatcaagaatatgtaatcactacatgtgttaaatattgtaacgggcgtataacacgcccgttgttttatgatgatgtaaaatcttccccaaaacccttccccaaaactggctattttctatgctgttttgatatctacgataatccagtctttaccacgatcatcattgtatcggtcggtcatttttctggatttatgacctaacaacttttgcgtatccagaccctgttcccgatataaccgttctgacagagatcgctgctcatgaaatgtgggcgcagttcctggctcccattttatgccacatttttccctggcctttttaaaagccgttgtaagagtatttgcagacacctggtctcctctgtttgcttgagaggtagtgtgacggtaatggaccagatatttactaacaacagcatccctgcactgagatataacttcacgaagggtaatattcagagcatcgcatttcaggttaagcggaatagcaagttttgaaccggttttttcctgagtaatgtgcaacatgtcgtcccagatatcagagaatttcaaattgcagatatcgcctaaacgttgtccagtgacaagagcaagtagcatcccgcattttaaatagggctgccgtctgcttacgctgtcaaatattgcctgccattcgggcagtgataatctttggcggtttactcgatttcgcggttgttttgttgcctgcgctgggttaaatcctggcggaacatgtcctgcgtgttgtgcttctttgaagacgtcgatcaacaccattctcacgacttgcgccatcctgttatgaccttcagcctttacagcatcaattatttcggcaatatcaagtgcggtaatatccttgaggtgttgcattccacaatgctcacggaaaagacgaatgggtttgcctttttgccgataggagttgggtcttagttcattatgttgcagcctgtcctcctggatagaaatatatttatcaagccattctgtcaccgtaatgtctgagcgcctgcctttcattctttctagacgctcattgacgcttaatatttgtcgggtacgttgttcagcaataatggtatttgcttcagtagcaacttgttttgcttcattctcatcagttcctaagctatgaaaacgaccggatagtggatgtttgtattgccaatatacctttccggttcgcttatctaatttgcaatataaattgggtatagagattttgtgagatcggggtctagcagccatcagcgattatccgttggagttttgggtttgcgtttattgggagttgcggttctgcaagcgttcctacaaaacgggaatttcggtcaatctgaaccgccccgggaatcctggagactaaacttcctgagaaagaggtaaacaggatgactaaaaatactcgtttttcccccgaagtccgtcaacgggcagtccgtatggttctggaaagtcagagcgaatatgactcacaatgggcgacaatttgttccattgctccaaagattggctgtacgccggagactctgcgtgtctgggttcgccagcatgagcgggataccgggggcggtgatggagggctcaccaccgctgaacgtcagcgtctgaaagagctggaacgtgaaaatcgtgaactgcgccgcagtaacgatatccttcgccaggcttccgcttattttgcgaaggcggagttcgaccgcctctggaaaaaatgatgccactgctggataagctgcgtgagcagtacggggtcggaccgctatgcagcgaactgcatattgccccgtcaacgtattaccactgtcagcaacagcgacatcatccggataaacgcagtgcccgtgcgcagcgcgatgactggctgaagaaagagatacagcgcgtatacgatgaaaatcacaaggtatacggtgtgcgtaaagtctggcgtcagttgttacgggaaggtatcagagtggccagatgcactgtggcacgtctcatggcggttatgggacttgccggtgttctccggggtaaaaaggtccgtacgaccatcagccggaaagccgttgccgcaggcgaccgcgtaaaccgtcagttcgtggcagaacgacctgaccagctgtgggtggctgattttacttacgtcagcacatggcggggcttcgtctatgtggcgttcatcattgatgtgtttgccggatacatcgtggggtggcgggtctcatcgtccatggaaacgacattcgtgctggatgcactggagcaggcgttatgggcccgtcgaccgtccggcacggtccatcacagtgataaaggttctcagtatgtatcgctggcctacacacagcggcttaaggaagccggattactggcatcaacaggaagtacaggcgactcgtatgacaacgcgatggcggagagcatcaatggtctttacaaagcggaggtaatacaccgtaagagctggaaaaaccgtgcagaagtggaactggccacactcacgtgggtggactggtataacaatcgacgattgctggaaaggctgggccatactcctccggcagaagcagaaaaagcttattatgcttccatcggaaacgatgatctggcagcctgagttcacagataaaacactctccaggaaacccggggcggttcaatcatccagtagcgaccaacttttatagcgggtggggccatcattttcccttgcgcgtattttttcagaactcgctcacttggtgctaagtccccaaattcttctttagcccagtcctgtaaagtgattagtcgagacatttgtcctcctcttagctgctgagggagtttgtgaccgatatatctgacatgatattaagctcatggcaggtacatctcttgactggtcatagagataaatttaatgctgagaaatgcagtattgaatttatcaatttttctatttcctgcgtatggcacgtaacttcttaatgtgttctgctgtttcgatctcttcagctatccgatctgcgtcagctttattcacaggttcaaagtcatgattaaagcggaacatgctggcgatacatgttctgccttttcggatgtagtgaactttgttgtgagtggaacgcaggattttgcagggagtgccgtggtggtcgacgtaccaggtgttagggtaaatcactctgaacattcttgaccttgtgttgtgcggattgttattcagtgccgatatttacctttatcgcgtatacctttaccggtttatcaccgaagtgcggatgtgtgattgtcttcacttcatatccgtcatacggaacatcaactctgcggctggaatcgtcgcgcttcggatatccctttgtgataatcaggcggtcatgcttacggttaacgaggcgctttttccagtagtcattacacaggcgatactcttccgttttctctccgcgaatcatggcatcgaagtattcacctttaacggcaagttgcaggttagccacggttaactccttgctgtgtggcgtcgagtaataaatcccacaaccgctgagagcaatttccgcatgtacagcgttgacccacaacgtttatcgcgttgctgatttccggcgttacctgtttaggaaccataacccaaccatccggagttaccggaagcgagaacggcagcacatctctgtgaacaagtttttgctgtgacaggttatccagaactttctgtactgctgcatcaccgaatacaccaagcgcatctgccataactcctacaacctgataagcctcagcgcataccgtggataaaccatccggaattaccggagagttgccgggttctttaatgtgcaagcgaggctcaccatcttttggctcaggccactggcgctccatgttgatcttcaatttatcttccatagcaacggtaatttcagcatcgctgatgccagcacggcgctgtgcatcccacaacagaaactgcatatcagcccactcgctaagatcgtctggttcggctgcggcttccagtgcctcttttgagaggtgtttcagtggaccaatggggccaacgcagccaaatgtggagtcagaccatttggcatgctcgtggcgaatctgttcgcgttccagtgatgccagtgcaattcgtgctagttccatttgttcgccacgagtaagcccgttttcaagcggatttttaatgaacaattcaatacgttctttggtaatagtggtcatgtgttaatcctcaaaactttatgcccgggcgcaaaagtacgtgttttgtctttgcttattcgccacccgtctttacgggcctcttttgcacaaccagaccatgacgtaccgatatactcaccgaagtctggcactggatatacaccttccgtacactggcgacaatcacaatagagatgcatggtgtaacttgcggcaatagccatatcactctctttttccctgaagcatggcagcgtggcaggcatcctctacgcccttaactgcatctgcgcagtagttatagcgattgcattccactaacttctgcctgagattttcaattgcttgcgcgacatcagcctgtattacaggaactggcggaacggctgtctgctgctctcgaacgtcattagtcgctatcggttctgctgccaactgactggcatatttgttaatggtaacgataagctcttgctcagcctcatccagacaatcaccgatacctcgcctgtcgccgtcaaaatcatcgaaatcagcacgaactctggcaaatttcaggattgcggacaacacctcaccaggaattaccggagagttggttgacgtttccgaaatttcccgaaaattattggttgacgaattcgcgttttcccgaaagtttccggcatgaagcatagccgcgcggcaggcgttccagcctctcacctctgcaatagcggcaacagcatcgaccgcgtacatgctaagagggttaggcattggtttttcttcaggtactactggcactggcttggcatatatagcggctgaacataccaaccctttgataaccaactgtcagcaatgtttttactcctcgttattgccggaatacctaagccattgtctgaatgcagccatgccaccggattctcttccagcgatgccagagcaatttcataagcccggcgctcaacattgtctcgcacatccaaactgctgatacgctctttgatttctttaatcagttctttgtcggtaaaagtgctcatatcaatctccattggtatcaatgtttacagcctgacaagactctttgagcacccagtcaatagcgtctttccatgcctctgtttcgactggtggattttcacgcttaacctgttcatagaagcgcactgctttaaccagtccttccggtactactggtgatggctgtttagcttctaaatcagcaattctgtcaaccacggcatcgacagcatctgaaaagccgaaccagttgctccactccggctcatccccggttgctgcaaagtacatatctgctaaagcagattcagcatggtcacgctcgttaatgagttgcttattagacgtcaactagttttgccgactcgcgccaactatactggccgcacccttcagtgcgacatcaagtcgcgcttgttactgccttcgctgtctttttcctgtagctttcacctttcagttcgaacatatatccgtgatggatcagccggtctgccgccgccaccgccatagtctcatccacgaagatgctgccccacatgctgaacggatggttactggttatcaccaggctcccacgttcatagcgatgcgctattaactcgaacagtactcccgtttcggcgctgtcgcgtttgacatagccaagatcatccaccactatcacccggtagcgatccagtttcagtagcagctcattcagtttcaactgcgctctggctttacgtagttcctgcaacaactctcctgcgctgtagaaccgggcccggtagccctggcctactacgccatccacgatcgctgccgccagatggcttttccccaacccgctggctccgaacagcagaacgttttctcctgcatcaacccagtctgtcgtttcacagagttgccggaactgagctccattcagttccggcacctgactgaagtcgtattcgcttagcgttttggcaactggcaaccgggcctcctttttataacgacgcagtttttcactctcgcgccacaggagttcttcattgcatagcgtcagaagatagcgcgatggtgtccagccttctgccagtgctcgtttttccagagcgtgccattcagctccaactcgtgtcaggcgtagtttacgcaggctgcgttcaaggtgatggatattgctcactgcgaacctcccttgccacgcagtagttgctcataactgctcaggttatgctgtttcacattgactaccggcaacgccttttcctttatacccaggaagcgcatcagccggtgcagatccacgtttcccggggtattcagcatctgctccataccttttgccacgactgagatatcgtcgtatcctgcagccagtttcagagcatgtaccatcagcctgcctgccatgtcgggttccagatgattacataagcgacgccacagcctccgccattcatcgtctggcaggatgtcatttctcagcgttgcatggcagaacgcaccgggcttttttgccagactgtcgatcacatgtcggaagtcgatacgacgggcccgcgtcttccctttttctggtctgacacgtgggcagctcatgacctcgctgctgccaacgtaacagctcagacgatcgtcccataaccggacccgtaacagttgacctacaagccgggaaggtacgctgtagacgacgtgcttcacattgatggtactgctgcggctaaccctcacagtcagctcatcatagtcagcactgcgacgaagcggcagcggtttcagatgaagacgttcttccttgaccagatcctgattgttacggttgtgccgcataacctgctgagtgatgaaggcctgatattcttctatggtgctgaagtcgttactgccccgcagtatcagcgcctgacagatacgccttttcagatgtccgtgggcactttcaaccgagccattttcgtggccccgaccggcattattgtgtacgccctgcattccgtagtgctgacagagagcagcataacgctcagtcagctcgcggcgtccatcttcgccctgttgtttccatgctgccctcaggctgtccgttttatgttctaccggcactccgcccagttgtccgagggcttcctgcagaccttcagccagagcagagaagctctcaccacccagcacaacccgcatccagctccagtggctccattccagacggaagtgatacaacttatgcgccaacaacttaccggcgatggtgacaactacacctttcagttcagtaaagtccgacagacctcgcagaccgggctgatgtcgctggcggaacatgacctcctgctctgcaccatactgtagcttccattcgcggacccgccgttgcattgttcttcgaaggctgttggggtactggccgggatatttatcctgtagcatctccagcagagttgttggtgtcagagccggcctctctttcaacagaggaacaagcatgctgtcccacacagcttccagaggatctttgcgtgtgcgccagtgccgaacactgttttttgcccactctcctttttcgatccgacgaccagaacggactgagataccagccttcatggccgagatatgctgagttatacctttcttacgctgagtcatatagtaactgacctgagaagtattgagcgtcacgccatttcctgttggatcatgtaaatgacactcaggttacaaaaccggccagaataatcggcgccaggcggactgagttattgtcgtctcatag

SEQ ID NO: 19 - DNA, 27612 bp, Escherichia coli
aaggcattaattttaatcagaacaatcacgtggtgattcagaacgacggccccaacgggcgggcagggccgcagctgatgaaagcggtgtatgagatggcccgcaagggggcacaggatgaactccggctgcagttgcgtgatggcggtatgttatcagggagcggtggatgaaaacctttcgctggaaagtgaagccggatatggaggtgaactcgcagccatcggtgcgtgaagtgcgttttggtgacgggtactcacagcgtatggcggcagggctgaatgctgacctgaaaacatacagggtgacgctttccgtgacccgggaggaggcccggcatctggaagcgttcctggcagagcacggtggctggaaggcatttttgtggaagccaccctatgcataccggcagataaaggtgacctgtgccgggtggtctgcgcgggtcgggatgttgcgcgttgagttcagcgcggagtttaagcaggtggtgaactgatgcaggatattcgcgaagaaagtctgaacgagtcggttaagtcagagcagtcaccgcgggtggtactctgggaaatcgacctgacggtacagggtggtgagcggtattttttctgtaatgagctgaatgaaaaaggggagccggtcacctggcaggggcgtaagtatgaggcatacccgattgacggcagcggctttgagatgaacggccggggcagcagtgccagaccgtcgctgacggtgtccaatctgttcggtctggtcaccgggatggcggaagacctgcagagtctggtgggggccacggtggtccgccgccgggtgtatgcccgttttctggatgcggtgaatttcgttgcgggcaatccggaggcggacccggagcaggagctgagtgaccgctgggtggtggagcagatgtygcagctgacagccatgacggcctcgtttgtgctggctacaccgaccgagacggacggggcgctgtttcccggtcgcatcatgctggcgaacacctgtatgtgggattaccggggagatgaatgcgggtataacggtcctgcggtggcggatgagttctgacaaccccaccacggatatccgtaaggacagatgcagcaagtgcatgcgcgggtgtgagatgcgcggcatggtggctaattttggcggtttcctttccattaacaaactttcgcagtaaatccaatgacacagacagaatcagcgattctggcgcatgcccggcggtgtgtgcctgcggagtcgtgcggcttagtggtgagaacgccggagggggagcggtatatcccttgtgtgaatatctctgcagagccggaggcgtattttcgtattgcaccggaagactggctgcgggcagagatgcagggggagattgtggcactggtccacagtcatcccggtgggctgccctggctgagcgaggctgaccggcggctgcagataaaaagcgcactgccctggtggctggtctgccggggtgacattcacaaattccgctgtgtgccacatctgacgggacggcgctttgagcacggggtgacggactgttacacgctgttccgggatgcttatcatctggcggggactgagatgccggattttcatcgcgaggatgactggtggcgtcacggtcagaatctctatctggataatctggaggccacagggctgtatcaggtgccgttgtcagcggcgcagccgggcgatgtgctgctgtgctgttttggttcatcggtgccgaatcatgccgccatttactgtggtgacggcgagctgctgcaccatattcctgaacaactgagtaaacgggagaggtattccgaaaaatggcaacgacgaacgcattctgtctggcgtcaccgccactggcacgcatctgccttcacggggatttgcaacgatttggccgccgcctcagcctgtatgtgaacacggcagcggaagccatccgtgccctgtcgttacaggtgccgggctttcgccgtcagatgaacgaaggctggtaccagatacgtattgccggtgatgacacggcaccggaggcggtgtacgcccgtcttcacgaacagctgggtgagggaacggtcatccacattgtgccgcgactggccggagccggaaagggcggactgcagattgtgctgggggcggcagccatcgtgggctctttcttcacggccggtgcctcgatggtgttatggggtacagccctgagtgccggcggtttttctgccaccacgatgctgttttcactgggggccagcatgatactgggcggtgtggcccagatgctggccccgaaggcaaaaacaccggattaccgcgcaacggataacggcagacagaacacgtacttttcctcgctggataacatgattgcccaggggaacccgatgccggtgccttacggggaaatgctggttggctcccgccgtatatcccaggacatcagcacccgtgatgaaggcgggggcggaaaggtcgtggttatcgggcggcaggggtaaaaagaataaaaaaatcccgcagtgatcgcggacaggaactgcgggagagttacgaagattaagtgtaaggaattattcttatatcacgacaaaaaaattaacgcagagaaattatacgcgccacagtcagtttgtgaaaatgtgaagatattcagaatttttatgccattaccggttttaaccaacaggattatcggtgggcatgaaagaaaaccccggtatctgctgataccggggtttctctttagcatggcagaaatgtgtttcatgcttttcgggcgaaggatatccgacttctgtacggaatggcaagtggcggttaatttattcaggggaaggctgtatgggaaaaggtggcggtaaggcacacacgcctcgtgaggcgaaggataatctcaaatccacgcagatgatgagtgtgattgatgcgattggtgagggaccgatagaaggtccggtgaagggactgcagagtattctggtgaacaaaaccccgctgacggacacggacggtaatcccgtgatacacggtgtgactgcggtctggcgtgccggggagcaggagcagacaccaccggaaggctttgagtcctccggagctgaaaccggactgggcgtggaagtgacgaaggcaaaaccggtgacgcgcaccattacgtccgcgaacattgaccgcctgcgggttaccttcggggtgcagtcactggtgcagaccacgtcaaagggcgaccgtaatccttcctctgtccggattctgattcagttacagcgtaatggccgctgggtgacggaaaaggatgtcaccattaacggcaagaccacctcgcagttcctggcctcggtgattctggataatctgcctccccggccctttaacatccggatggtcagggagacggcggacagcaccacggaccagctgcagaataagacgctgtggtcgtcatacaccgaaatcatcgatgtgaaacagtgctacccgaacacggccattgtggggctgcaggtggatgcggagcagttcggcggccagcagatgacggtgaactaccatatccgcggtcgcatcatccaggtgccgtcaaactatgacccggaaaaacgcacgtacagtggtatctgggacggcagcctgaaaccggcatacagcaacaacccggcctggtgtctgtgggacatgctgactcacccgcgctacggcatgggaaaacgtctgggggcggcggatgtggacaagtgggcgctgtatgccatcgggcagtactgcgaccagacggtcccggatggtttcggggggaccgagccgcggatgacctttaatgcgtacctggcacaacagcgtaaggcgtgggacgttctcagtgatttctgctctgcgatgcgctgtatgccggtatggaacggccagacgctgatgttcgttcaggaccgtccgtcggatgtggtgtggccgtacaccaacagcgatgtggtggtggatgataacggcgtgggtttccgctacagcttcagtgccctgaaggaccggcacacggcagtggaggtgaattacaccgacccgcagaacggctggcagacctccacggaactggtggaagacccggaagccatactgcgctacggacgcaacctgctgaagatggacgcgttcggctgtaccagccgcggtcaggcccaccgtgccgggctgtgggtgataaagaccgaactgctggaaacgcagacggtggatttcacgctcgggtcacaggggctgcgtcacacacccggtgacatcattgaaatctgtgataacgactatgccgggaccatgaccggcggacgtgtcctgtccatcgatgccgccagccgtaccctgacgctggaccgggaggtgacactgccggagaccggcacggccactgttaatctgattaacggcagcggtaaagccggcgagcgtggccatcaccgcacaccccgcgcctgaccggatacaggtcagcaccctgccggatggtgtgragacatacggtgtgtggggactctccctgccgtcactgcgtcgtcgcctgttccgctgtgtctccattcgggaaaacacggacggcacgttcgccatcacggcggtgcagcacgtaccggaaaaagaagccattgtggataacggggccagctttgagccgcagtcaggcagcctgaacagcgttatcccaccggcagtgcagcacctgacggtggaggtgagtgcagctgacggtcagtatctggcacaggcgaaatgggacacgccgcgggtggtgaagggtgtgcgcttcagtctgcgtctgaccagcggaagcggagaagacagccgtctggtgagcaccgccatcaccgcagacacggagcaccgtttcagtggtctgccgctgggggaatacaccctgacggtgcgggccattaacagctacggccagcagggcgaacctgcgaccaccaccttccggattaacgcgcctgcaaaacccgccaccattgagctgacgccggggtattttcagataacggcggtcccgcgtcttgcggtgtatgacccgacggtacagtttgaattctggttctcagaaaaacgcatcacgaacacggcacaggtggaaaaatctgcccgttatctggggaccggcagtcagtggactgtccaggggagccggattaagccggggacggatttctggttttacgtgcgaagcgtcaacctggtgggaaaatctgcttttgtggaagccagcgggcagcccagcaatgatggtgaagggtatctggaaattttccgggggctgatagatgagacgcttctgggccaggcactgaaagagcgcattgatgcttcagcgctgcgtacggaggtcacgcaactggaagaagacatccgtcagcggatggacacggatatcgcagaagtgacccggaaaatcggggaggcggaaaacagcctcacgcagctggttgcgaaaaagaatgaggaccagacactggccatcgcgcaggtgagccagaaagtggaccgggtgagcagtgaaatctcacagactgtcagccaggggcagtcagaaaatgcccgacagatagcacaggtccgccagtacgtggataaaaaagggagtgaaattacctcgaccacggataaaaaactgggtgaccaggccgtgaccatacagcaaatccagcgggttcagtcagacacgcgcaatgagctgaatgccatgtatatgctgaaggtgcagaaaacaaaaaacggtattccctatgtggccgggattggtgcggggattgaggatgttgatggtcagacgctgagcagtattctgctgcaggctgaccgtatcgcgatgattaccccggagaatggcaacaccacgccgctgtttgtggcgcaggggaatcagctgttcatgaacgacgtgttcctgaagcgactgtttgcggtgagcatcacgtcatccggcaatcctcctacgttttccctgacgccggatggcaggctggcagcccgcaatgcggatatcagtggagccatcacggcgaataccggcacgctcaataatgtcaccattaacgagaactgtgtcatcagagggaaactgtctgcaaaccagattgaaggcgatctcgttaaaacagtgggtaaggctttcccccgtgactcccgtgcaccggagaggtggccatcagggaccattaccgtcagggtttatgacgatcagccgtttgaccggcaaattgttattccggcggtggcattcagcggtgccagacatgagcgggagaataacgatatttattcgtcatgccgcctgatagtacggaaaaacggtgctgaaatttataaccgtaccgcgctggataatacgctggtttacagtggtgttattgatatgcctgctggtcgcggccacatgacgctggagttttctgtatcagcatggtgggtaaatggctggtatcccacagcaagtatcagcgatttgctggttgttgtgatgaagaaagccactgcaggcatcacgattagctgaattttataaccccaatacgggcgccagaaatggcgccttttttattgcagaaaagcgagaggtaattatgcgtaaattatgtgctgttattctgtccgcagtagtctggctggttgccgctggtacgccagcgagcgcagcagagcatcagtccacactaagcgccgggtatcttcagacccacactgatatgccaggcagcgataatctgaacgggattaacgtgaaataccgttatgagtttacggacgcgctggggctgattacgtccttcagttatgccaatgctgaggatgagcaaaaaacgcactacagcgatacccgctggcatgaagattccgtgcgtaaccgctggttcagcgtgatggcggggccatctgtacgcgtgaatgaatggttcagtgcttatgcgatggcaggtgtggcttacagccgtgtgtcgacgttctccggggattatctccgcgtaactgacaacaaggggaaaacgcacgatgtgctgaccggaagtgatgacgatcgccacagcaacacgtctctggcgtggggagctggcgtgcagtttaacccgaccgaatccgtgaccattgatattgcttatgaaggttccggtagtggcgactggcgaacggatgcatttattgttggtatcggataccgtttctgacaacagacgccgatttatcttctgtaaatattgttatgatacgcaggttcatccgccttatggggtgaactgcgtttgaggaaacgtaaagttacactgtcctgaagcccgtggcgtcactgctgcgggctttttttattggtggaaaagtatgacagtaaaaatttctggcgtgcttaaagatggcacaggaaaaccagtacagaactgcaccattgtgctgaaggccagacggaccagcagcacggtggtggtgaacacggtggcctctgaaaatccggatgaagccgggcgttacagcatggatgttgagtatggccagtacagcgtcaccctgctggttgaagattttccgccttcacatgccgggaccattaccgtctatgaaggttccaagaccaggtacgctgaatgattttctcggcgccatgacggaggatgatgttcgtccggaggcactgcgccgttttgagctgatggtgaatgaagtggcacgtcatgccggagcgtcatcacagagtgcagcggcggcaaagaaatccgaaacggcagcagcctcatcgaagaatgcggcgaaaacctcagaaacgaatgcagctaacagcgcacaggcggcagcggcctcgcagactgcatcggcaaactccgcgacagcagccaaaaaatcagaaaccagcgcgaaaaatagcgagacagccacaaaggccagcgaaaaaaacgcaaaatccagccagacggcagcgaaaaccagtgagacgaatgccaaagacagtgaagccaacgcaaaggtgagcgaaacagcggcggcgaactcggcgaaagcatcggcagcaagccagacggcagcaaaagcaagtgaagatgctgccagagaatacgcaaaccagacagcagagccgtacagatatgttttacagccgctgccggatgtgtggataccctttaatgattcgctggatatgattacgggctattctccgggttataaaaaagtgaagattggtgataatgtggttcaggttgccagtgataaacaggttaatttcagtcgcgcatcaacggcaacatatatcaacaaatctggcgaactgaaaacggcggaaattaatgagccgcgatttgagtgtgatggcctgcttattgagggacaaagaacgaacttcttccagaacagtacagacccttcgaagtggaataagtcaacttcactggacgttacagaaacaggcacagatagtttcgggtttaattatggtcggtttgtcgtacaggattcgattgttggtacaagtaaagcgcataccattatcggactgtattcgagtaccggaggggttgatacttcaggggacgaaaagcatgtaactatatcctgtcgggtaaaaagtgaagttgataatatcgccgttcgtattttatttgaacattatgatggggaggtaaggacatcaataggagcagcaaacctgaaccttaccacccgcataattagcaagacaggtcagacaagccgtgttacagcaaggtctgttaaggatgatgcaactggctggatattttttgaggctacattaaaagcagatacaacagaaaatacggttggtggttttgtccagtattctccggatacagggcagatggttacatcaggggattatctcgatgtaaccactccacagattgaggctggtacaggcgcatcatcttttattgttacggggacggcaccggcaacgcgggcaagcgatatggtgacagtcccaatcaagaataacctttataatcttccttttacggttctttgtgaggtacataagaactggtataaaacgccaaatgtagcgccgcgtgtttttgataccggcggtcatcaaaccggagcggggatcgtaatggggtttggttcatcaggtgggtacgacggttttccgtattgcgatataggtggttcagaccgacgaataaatgaaaatgccgggctggaaaaaatgcttattggtatgcgggtaaagtccgaacggtccacatgtgtagtcagtaacggtaagttaagcagcgaaactaaaaccaaatgggaatatatccggagtacagcaaccattcgcattggtggacaaactacagcaggattacgccatttatttgggcatgtgaggaattttcgtctctggcataaagagctaacagatgcgcagcttggggaggttgtggagtgagagatttcacgttgcgtttcagtgataaagcagatttcagggcatttctcaggaaacttaactgggaagaggacgaagagctgcagaatgccgttctggttgatgagattggttttacgttcagggagacagatgtttctgatgacggagaaccagaatacacgcgaaacgaagggtactttgttaatatccgtcttcttgacgatggatttgaggattccgtgttccgtgagtgggtggttacaccagagcgcccgctcagggagtggttttaaggatagcagatggatatcacgtcgatacttcatgcgctttgtgccgtggcggtgcaggtactggctggtctttttaccggaaactgggcttacggggcgatagccggttgtacgttcttcattgcgcgtgaacacacccaggcagaatatcgctggattgaaatgttcgggcatggcaagcggattaacatgccgtggtggggcggttttgatccacgtgcatgggatgtggcaagcctgatggattttgctgtgccggtggtggcgtgtctgctggtctggctgttggttaatcgtgggtgaaaaaggtgagcagtatatgcaacgaaggaggaaacatcattgctggcggcatggaaggcatgcagggtgttgctgaaccgtgttgatacatcaactgcccctgatattgagtggcctgtgaaccctgtcagagagtaatcattgggattatgccgcagcacgtcgtgcgcaagaacgtgctgcggctggatgctattttttccctgaagcggaaaacattactacagtacctttaaccttggttttaacattctcgaaatgctctgagagtatatgtgttaagccttcttcggaatcttttgtgtttgaaaagatgcctttctgattgtaaatgcgcatcagtttttgaccgaagctattgtgcacaacgccgtcaccaagaattgtggctccgtatagagttccatcgtcagttaaggcctgcgccgcattgcgtattacacagctttttgtagatatatttccaggcaggcagtgaagaaggtaaaacatggaaatggaatcaaattgaccatgtaacgccgcgggataaggatcaaaaacatcatggctaattttatgtttaatttttgattccccagcccttgtcgatgccgcgttcaggctagcttcgttcaaatccattaaagatatcagactgctctcaggtacgtgagtaaggtaaaacccagttccaacgccaatatccagatggttgttacctaaatgttccagaaagtgtggaagaaggtgttcctttgtaggacatccccatgcaagccgatttgatactcccaaaacccaccagtcataaagctttagggtaagtggtgtgtaaattttagccccatcatctgtgttttttttcattagtttcaccgtattatagttttatttgtgaattaaatcaattatggcgatgaattacaaggggttaaatgctgccgcagcatagcgatattgaaatagcctggtatgcttcgatacagcaggagccgaatggctggaagaccgtcaccacacagttctacatccaggaattcagtgagtatattgcgccactgcaggatgctgtagatctggaaatcgcaacggaggaagaaagatcgttgctggaggcatggaataaatatcgggtattgttgaatcgtgttgatacatcaactgcacctgatattgagtggccgacttcacctgcagagtaatcaacggcgcagggatgatattttgtgcttgaagtgcctccccgaccattcagatagtcggggaggggtattgggattatacgcaatcagttttagttaaagaccgaagctctcgaaaaatctttctccaaaaccagaatggaattgattgattttgataggatctataacgtcgttaccttaaacggcaaaaccactcaaaaacaaacttaatgcattgaatataaaggattaatcatctaattcgctcaccttcttattcagcagacgagaagcgcgccagtaaaccagcaacatcaggcccattacgatagtcagcgtaatgctggtggctgcaccaaacggccagtcacgaatattgaggaactgtaccttgatgacgttaccgatcagcaggtttttcgcaccgcccatcaggtcggacacatagaacaggcccatcgctggcagcatcaccagcagacatccggcaataattcccggcatcgttagtgggataatgatgcggataaaggtctgcaacttgctggcaccgagatcgcgcgccgcctcaagcaacggcttatccagtttttcgatactggagtacagcggcatcaccataaacggcagcagaatgtaaaccagaccgataatcaccgcactaggcgtgaacatgatgcgaattggtgtatcgataacgcccagccagagcaaaaactcgttgagatagcctttggtgctgaggaaaattttcagcccgtaaatacgaatcaatgagttggtccagaacggaacaatcagcagaaacagcagcagcggacgcaccttgtgtggcagcttcgccagaaaccaggcaaaaggatagcccagcaccaggctggcgagggtggcgatcagcgccatattcagcgagtgcaatagcacttcaaaatagagcggatcgagcagacgcgtgtagttatccagcgtaaagaccattttgacgaaactggcgtcgtcgcgggtcaaaaagctggtgccaatgatcatcaggttgggcagaaagacaaacaacacaagccaaccgacaatagtgacaatcactacattctggaacttacttgtgttcttcatcagccagtacgacctcccagctttctacccaattaatggccattttttggtcgagagagtggtcaaagtcaggatcgtcttcattgaagaattcgctgaccatcaccatcttgccattttccagctcaacaaccgactccagcgtcatgcctttgtagttacgctcgcgaacgtaaccaatcagcccttcggcgtggttgtcgtcgttaatctcttcaacacgtaagtcttccgggcgcagcagaacatgcagtttttgccccggttcaacggcgaagttaacgtagatattacattcgcggccttcaacgttggcgcgtacgcgctgctcgtcgagacgttcgatgacagtggcgttaaacatattgatttcgccaataaacccggcaacaaacaggtttttcggctcttcgtagatttcacgcggcgtgccgtcttgctcaatgcgaccatcgcgcatcaccacgatcctgtccgacatagtaagtgcttcttcctggtcgtgagttacgaacacgaatgtaatgccaagcttacgctgtaacgctttcagctcgttctgcatttgcttgcgcagtttgtaatccagcgctgagagcgactcatccagcaacaacagacgaggcttgttaaccaccgcgcgggcaatggcgacgcgttgctgttgaccaccagagagctgatgcggtttgcgttgagcgaaggtttccagctgcaccatccgcagggcttccatcacgcggggcgtaatttcagcagcgggggttttttgcatgcgcaacccaaaggccacattttcgaacacggtcatgtgggggaaaagtgcgtagctttggaaaacagtgttcacgtagcggttttccgccggaacgtgggtgatgtcctcgttatccaacatgatgcgtccggaatcaacagtttccagacctgcaatcaggcgaagaacggttgttttaccgcagccagaagggccaagcagcgtgaggaactcgccattgttgatagtcagatccagctggggaatgacctctttaccatcaaagcatttgcgaattcccgccaattgcaccagcggtgaaagcgaactcggttgtttattcaattttttactctgtcccatgtaaacgcaacggatggcttaccgatgcggggtttgtggttaaccaccttggtgactcttaatgagggcggtaattctacggcaaaccgcttgaatcgccaatctttgttgtgaattactggcttagctttatattcattaaggtaatgctgataaatattcccgcttgcaggggtaaaagtgacctgacgcaatatttgtcttttgttgcttcttaataatgttgtcacaaaaagtgagggtgactacatggataaactacttgagcgatttttgaactacgtgtctctggatacccaatcaaaagcaggggtgagacaggttcccagcacggaaggccaatggaagttattgcatctgctgaaagagcagctcgaagagatggggcttatcaatgtgaccttaagtgagaagggaactttgatggcgacgttaccggctaacgtccctggcgatatcccggcgattggctttatttctcatgtggatacctcaccggattgcagcggcaaaaatgtgaatccgcaaattgttgaaaactatcgcggtggcgatattgcgctgggtatcggcgatgaagttttatcaccggttatgttcccggtgctgcatcagctactgggtcagacgctgattaccaccgatggtaaaaccttgttaggtgccgatgacaaagcaggtattgcagaaatcatgaccgcgctggcggtattgcaacaaaaaaacattccgcatggtgatattcgcgtcgcctttaccccggatgaagaagtgggcaaaggggcgaagcattttgatgttgacgccttcgatgcccgctgggcttacaccgttgatggtggtggcgtcggcgaactggagtttgaaaacttcaacgccgcgtcggtcaatatcaaaattgtcggtaacaatgttcacccgggcacggcgaaaggagtaatggtaaatgcgctgtcgctggcggcacgtattcatgcggaagttccggcggatgaaagcccggaaatgacagaaggctatgaaggtttctatcacctggcgagcatgaaaggcactgttgaacgggccgatatgcactacatcatccgtgatttcgaccgtaaacagtttgaagcgcgtaaacgtaaaatgatggagatcgctaaaaaagtgggcaaagggttacatcctgattgctacattgaactggtgattgaagacagttactacaatatgcgcgagaaagtggttgagcatccgcatattctcgatatcgcccagcaggcgatgcgtgactgcgatattgaaccggaactgaaaccgatccgcggcggtaccgacggcgcgcagttgtcgtttatgggattaccgtgcccgaacctgttcactggcggttacaactatcatggtaagcatgagtttgtgactctggaaggtatggaaaaagcggtgcaggtgatcgtccgtattgccgagttgacggcgcaacggaagtaagcaaaaagggatgcggcatgtgatgccgcatccggcttaaatccaaacttacccttcgaagaaccagtatccgctattgaccagcgccgcgagcatcgcgaggaatgacggatcttccagcgcatcgccaaaattctccgcggtcagcgcaatgttgctggcgagtgcatccagtgccggacggtgcggggaatcgattttctcaccattggcatacacgtcgtcgccaatgcgcaatacgcgcagaccccccaggcgcaccagcacatcaccttgtttcagcgcatcgtagatttcatccggctgataaggcggctctggcggcgcgatatccagttcatgacgtgactgggatataaactcgccaaaccattgcttaaagtgttccggctggttgatcaattcgagcatcatctcacgcagtttatccatctcttgcggcagaacgtccgcaggatgagcgcgaggtggaacatcaggatcgctgtagtagttgccgcccagttcacgttgcagcacataatcggcaaatccgctaatcagttcccgcgtattcggcgcgcgaaaacccacggaatagttcatcgcattttccagcgcgtagccttcatgcgggaatcctggcggaatataaagaatatcgccaggctccagctcttcatcgatgatggcttcgaacggatcgacctgtaacagatccgggtgcgggcagtgctgtttcatttgcagcttttcacccactcgccagcgacgacgaccggtaccctgaatgataaacacgtcgtactgatcgagatgcgggccgacgccgccgcccggtacagaaaaagagatcatcagatcatcaatacgccagtccggtagttcacggaacggtcgcattagcgcagcggtcggctcatgccagtggttcactgcttgcactaacaatgaccagttagtttctccgagatgatcgtagctttcgaatggaccgtggctgacctgccatttgccatcctgatgactgaccagtcgactgtcgacttcgctttccatcgccagacccgccaactcgtctggagagattgggtcaataaaattattaaagccgcgttttaacaccaccgggcgtttctgccagtgacgttcaagaaaatcgggccagttaagagtgagttggtattccatgttaagcatccacaggctggtatctgcaaccgattataacggatgcttaacgtaatgcgtgaagtatggacatattttatcaattagtgttttttgccgtttcataatgtttcagattgttcactatgtttttgattataaacagatttgtgattttccttgttccagcttgtttcacgttgtagccctttgtgcaacgatcggtgtagttaatggtgtagttaattgtgatgaccggaatcaaaattatgagcagagcacttaacaaactgagcgatacacagctgaggaaaatcaacggcacacccgcccaaaaaacagcctttcttaatgacggtggaaacctgagcgtcaggcattcaaccagcggccttttaacctggtatttcacctacagggccggaacgggaaggggagcacgaccggaacggattaagctgggaaattatcctgatctgagtctgaaagctgccagggaaaaagcggcacagtgtcgcgcttggcttgctgaggggaaaaatccacgtcatgagatgaattacaccgtacagaaagcgttaaagcccgtaacggttggcgatgcgcttacctactggcttgagtcttacgtaaaggaaaaccgcgtggattatgccgccctgaaaaagcgccttaataatcacgtaatacagcacattggtgctatgccgctggataaatgcgagctacggcactggctggcctgttttgaccaggtggcaaagcgaacgcctgttactgccggattcttgctacagacgtgcaaacaggcgcttaagttctgccggaggcggcgctatgcaatcagcaacgttcttgatgatatgagtgtggcggacgttgggaaaaaaccggatataagcgagcgtgtcttaagcaccaaagaacttggcgaattattgcaggcactggacaaaaaaatattttccccttactacgtcgcactaatccgcctcctgattgttttcggatgccggacggtagaactgaggttatcggagatcagcgagtgggattttaccgaaatgctctggaccgtgccgaaagaacacagcaaaacgaaggtggcaatattccggcccataccggaagcaatactgccgttcgtcacgcagctggtggagcagaacaggcacacgggcttattgctgggggaagtgaaacaggaaacaagcgtgtcgcagtacggcagattagcgcacaggaggctaaaacaccctcactggtcactgcatgacatccggcgcacctttacaacgatgctgaacgatttaggcgtggatcctcacgtcgtggagcagcttacaggtcatcagatgccagggatgcaacgagtctataaccattcccgttatctggatgcgaaacgtgacgcgctggatatgtggacggagcggttagggatactggcgggaacacatgaaaacgtaaccacattgccaatagccagagaaatataattttttttgcgatttttcaggatgcggacaacgtgaaacaacgagacacaacgacgaacaacaaggaacaaaatggaacaacgggttaaaaatcagccatcgtaataaccatttgatttttataggtgtactgtttttttatacactggcgaatcactcttaaaaatatgtaaaaaaggcgtaaaagtaaaattttatgcctttgcatcataatgaattaaaagagtttttattctcatttcccctgcttctgtaaaacgaccgccgccagtgtttgccattccacaaacaccctgacacaatccgacacaacccaacccaataatccacccaatgactctttaagaaacaacaaagggggaattgtgttaagcacagatcgctttatacgtgaaaaagaatgtcagcaacttacaggcctgagccgctcatgtcggtaccgcctggaaaaagccggacaattcccatcacggcgtaagctgggcggtcgttccgttggctggtctttatccgaagttctggcatggaaggacagctgcgaggcagttcactaatcaggctggcggcacacagccgccacccatccactaatacagagatctaaccatgaatactggatattctcccgaacaagggcggggcttcgttcgtcctgaaaaacagaatctgcaaaattttgccgaaattattccggttatttccggccttactggcgggagtgaaaccaatattgttaacgccagagcgttgcagatgtttgatgataaaaagggagtaaatttaacttacacccctgacggcaatcagaatatgagcattatctctgagtcaggtttctacaaactaataaaaacaaaaagcgccccgttgccggagcgcctttgtgaacaattaacctactgcgcaaaaaatgaatctgagcagtgggattatatcaaccatgtggagaagcgccacaattgccgaataacgggcaaaacaaaggccacccgctacggtggcccctcgacacaagctacacgttatccccaacgcatgagcattgccaacaatgccacatttgcggctggtgggcaatgcaatcagtcaggttcagttcgttgccatacctgcaatgagcgcttttccctgtactctttaaggaattgctcaagggcaaaagcacatggcgcgaatctttctgattcatgctctatctttctgcgccgtcttttccgtgccggtgataatgttttggtcaattctttatcggtcattgtgttgtcctgcatagcaatgcgccgtagttactcacaccacggcgctggtgatggttactcctgctctttggccttgcggcgctggcggcgtttgatctcgccttgcattgacgcaatgatgaattgtgatgtgctttcgcctgattctttcactgattccatggcgtttactatttcgtgtggtacacgagcctttagagcttgtgattttgcgtttgttgtacccgttgccatttctattcctctgttggattggtgggggacagtatacacagaaaaagcacaaataaaacccttgacgtgggccacacctaaagcatatagtgggccacaccttgagattatcaaggtgcataaatgcaaagccccgcaagtgtcgttaccactcgcagggcttctaaccaccaacgatagcgaaagtatcgaggtagctatgttaaatcataccacacacccgcaagggcgggactcgcacaacctgaataaatacatctggcgttttatcgccctgagcacggcacaaccgcgcgtgattaccattgaggccaccagcgaacaggaagcacgccagcaatctccggctggctgcgtgatggtatttgctgcccgtattcgtcagggggtaggcttatgagccaggaaatcacactacaacaggcagcagaacgcgcccaccaaatcgaagttatttgcgcactggcagaggattaccctggcatgatgaccgacagcgaatcaggggcaatcatcggcttacttaaacgccttagcggtgaggtctgcgtattcctgagcgatgaacaggaaagaagaacgcttatttctaacgaaaaaaaatgcggaggggtacatgtgcaataaaaccacaccggacgcagccgccgccgcactcactacgctgatgcacgcgcttattgatattgaatgcacggcagagcttgcgcagggagaagaacagaaagaccggacacagttcgccctggaatgtatccgatacatcgcaacgcggtcgctgaatgacgctaaaaatattcttgttgctgattgtgaaaatggggggggttatgcgtgatgatcgttttaattccctgaaacaggaattttccggcgttcctgatgatgcggctgatgcgctttcgtcaatgccagaacttattagagcggcttttttcttactttccacgagagaatataaatcaacggggcttgatgtactgaatatcgccgccgattatgctgatttcgtgacagaggttattttaagaaaaacgacggacggggattaatatgcgtgatatttaccacgaaacaatagaccgcgcatttcttgcactttctcacagtgaaaatatgttggaaatattgcgcatatgtcttgaaacgcttggagataatgaacgtgataaacagaaatcaaggattgtcacggcattaataacgcttcttgagcctgtaataaatgagttgcaggaaatagagacattacacgaccagtataaagcgccccacaccggagaataaaaataatgaaacttaaatattctggcttaactgccagtggcaaaactcgcactaaattcatgcgcggtgatatttaccgcgataagtacggcggcacggtaatgattaagggcgtggaggaacggcgcgtaacctaccgtcgtgaaggttacgaatatgattgcgtgatgcctgtttatcagttccggcgtgatttttctctggtacagaccgcgccgcataacgtgtccaccagcaacgccagggcacgggcaaacatccagaagctgaaaaccatgattaacggattcaggggtaaaaaatgaaactggcaccgaacgtaaaacagcagtcacgcggcataaaacacaaagaaacagaagtcattatttttgcgggtagtgatgcctggtcacacgcaaaacaatggcaggaacatgacgcgcgtatggccggagataatgagcctcctgtgtggcttggggagcagcagttatccgaactggataagctgcaaattgtgccggaaggcagaaaatccgtgcgcatattcagggccggatatcttgcgccagtaatgataaaggcgattggtcagaagctggcggcggcaggcgtacaggatgcaaatttttaccctgatggtatgcacggtcagaaggtggagaactggcgcgaatatctggcccgtgagcgccagaatctttctgatggtctggtcattgagcttccggtaaagcaaaaggcgcaactttcgcagatggcggacagtgagcgcgcgcagctgcttgccgatcgctttgatggcgtttgcgtacatcctgaaagtgaaatcgttcacgtatggcgcggcggggtatggtgtccggtcagcacaatggagctgagccgcgaaatggtggcgatctattcagagcacagggccactttcagcaagcgcgtaatcaataacgccgtggaagcgttaaaagttattgccgaaccaatgggcgagccgtccggcgatttgctgccgttcgccaatggtgcgcttgacctgaaaacgggggaattttccccgcacacgccggagaactggatcaccacgcacaacggcattgagtacacgccaccagcacccggggagaacatccgcgataacgcgccaaactttcataaatggcttgagcacgcagccggaaaagacccgcgcaagatgatgcgtatatgtgccgcgctgtacatgattatggcgaaccggtacgactggcagatgtttattgaggccaccggagacggcgggagcggtaaaagtacattcacacacatagccagccttctggcagggaaacaaaacacggtaagcgctgaaatgacatcgcttgatgatgctggtgggcgtgcgcaggttgtcgggagtcgtcttatcgtcctggcagaccagccgaaatatacaggcgaaggaacgggcatcaagaaaatcacgggcggcgaccccgtggaaattaacccgaaatatgaaaagcgttttacggcggtaatcagggcggtggtgctggcaaccaataacaatccgatgatattcaccgaacgggccggaggtgtggcacgtcgtcgggtgatattccggttcgataacatcgtaagcgaggcagaaaaagacagggagctaccggaaaagatcgcggctgaaatccctgtcattatccgccgcttgctggcgaactttgccgaccctgaaaaggcacgggctttactcattgaacagcgtgacggtgatgaagcactggcaataaagcaacagacggatccggttattgagttttgccagttcctgaattttctggaggaagcacgcggcctgatgatgggcggcggtggcgattcagtgaagtacacgaccagaaacagcctttaccgcgtctatctggcgtttatggcgtacgcaggcaggagcaaaccgctaaacgtaaatgactttggcaaggctatgaagccagccgcgaaagtttacggacatgaatatattacgcggaaagttaaaggagtaacgcagactaacgcaataacaacagacgattgcgacgcgtttttataatttgttgcaatggctgtctaccctgtctacctgagtaaagaaaaatacatttaattcagtacattaacttgggtagacagcctttttttactgtctacctactatctaccctctctacctgattttacctgaatcagacagggaggtagatacggggtagatagtggataaaagcactctaccccactgaaagccgcgccattactggcatggtggccagtaaggtagataaggtagacaaggggaggcacaactcaaaactttttaaacgagggggtaaaaataaaaatgcgcacatcaggaaaacttaataatcagaagaagcagcataaccgcgccattgaccttacagagcactggctgagagtggcgataaaaatcatcgaccgcaacacgggggaaggatacgcgaaagcacatcccgacctgataagcgcattcatgaccacagcggcggcaaactttgccacgctgacagaatgggagattgccgaagcggaacaggtaacaaccatcaacgttaaaaccggagaggtggaatcatgacagcacagatagcagcttacgggcggctggtggacgacccgcaggtaaaacagaccagcaagggcacaccaatgacgctggcacgtatggcggtatcgttgccatgtagtcaggcgcaggatgggcaggctacgttatggctatcggtgatggcatttggtaagcaggccgacttcctggctaaacatcaaaaaggcgacgttgccagcgtatccggcacgatgcaggtcagccagtggaccggacagaacggggaaacgcggcagggttatcaggttattgcagacagcgtaatcagtgcccgtgcggcacgtcctggcgggaacagacgcaaaaccacaggcacacagggtaatcagccaccagcgggaggcgatgacccttacggtgatgatattccgttctgagggggtgaggatggtacatgaccgcatagcggaggaactcgaggcaaaaggcttttaccggagggcggcggcacgatggggtgaagtcatgcaactggtggagacagacaaggaacggcatcaggttacgatgcgacggctggaatgttccaggaaggcacagaggccaccggagccgccaacggagaactatgcagacctgagaaatgcagtaaatcgcacttacgcagacatggggctgagcaaattagcagagtaggaataccagaaccacaccacacagccggagcaatccggcttttttgcgcccaaaaaaagcccgataaggtcagaggtggcttatcgggcttttgcatatgaggttttttggtgcactgacacacatgatcgggataaacatttcataatttgcaacgcaactcaatatcattgctcaaaatgcaatcatgattataatcataactggatgaacatccagttatgattttttaagtcaaagaggaatttcttactatggctgaagagaaaaaaggcggtgtttcggtgtacataagccccgacatcgtgaaggcgctcaaggaacgccaccagcagaacgtaaaagcaggcattgcggcaggacttgatccgctggcgatggttgagccgtcaacaggctggcaggtacgcgcctatttacgcgcggcgcagggtatgaatcaggttcacgggggtgaataatgacagtaaaagcaatggcacttaacactaaccagctttttgcgtacctgaatcgcggggatattgcggaatttaaattcagtccgctgtttaccacgctgtttttcccgaacgtggcgacattcagcacgcaaaacatcatgctggataccctggacattgaagaagtcaccatgtcggcgttttgttcgcctatggtgggtagccaggttcagcgcgataaagggtacgaaaccagcacgattaaacctggctacatgaagccaaagcacgaaatcgatccaacgaaaaccatcatgcgcatggctggagaagatccggcacagcttaacgaccctacctatcgccgtatgcgcctgattactggcaatatgcgccgccagataaacgccataaaagcgcgcgtggaatggctggcggtaaatgcggtaacgaccggaaaaaacatcattgagggcgaaggcatagagcgctatgaaatcgactggaagataccggaaaaaaacatcatagagcaggccgacgggaaaaaatggtcagagcaggacaaagaaacccactatccaatctatgatatcgaactatacgccgatcaggctggttgccccgcaaacgtcatgattatgggcgctgaggtatggcgaacgttacgcagctttaaaaaattccgtgagctgtacgatctttcccgtggttcagaatccgccgccgaactggcctgtaaaaacctgggcgaagtggtgagctttaaaggctatcttggtgatctggcccttatcgtctattccggcaaatacactgacagcgatggtaccgaaaaatatttccttgagcctgatttgctggtcctaggtaacaccaacaataaagggctggtggcctatggtgcgataatggatcaggaagcggtaagaacgggcgcaacacaaaacatgttttacccgaaaaactggattgaggacggagatccggcgattgagtacgtgcagacgcacagcgcaccgcagccggttccggcagatattcgcaaatttgttactgtcaaaattgcttaacgggggattctatggacactccatacattgagttatttgcaggcagtcagcaggtcgccacgacgctggtacattttgccgctgatgctggcgttattcaggaatttaccccgctgatgctggcggacaatggcgagtttaagccgtgggatggtaaggaatctggcaaggctgtttatctgacctcgtaccctgtggacacgtcaaagcagaaatcagcacagtgttacaagacggggatattcaatattgccgccgttaactggcctgagagcgtcgacaccgatgcgaaaaaatgcgccgcctttgcgggttctggcgtatccgttcagccgctggcccgataagcagggggaacgatggcaacgaatgaaagcatcatgacgctaccgctggcgagtaaatttaaagccgaagcgcgggcaatggctgacagaggtttatcaacctatgaggccgtatatcaactaaacaaactggaagagcaggacaagccgcgcgctgatgcgattatggcgcttgatgaatctggcgactatcagccgctgttacgtgcaatggcaaacgtgccttgtatcgatgttggtacggctaaaagcatccttagcatgaccatagagcaggaacgtccgaaggttgcgccggaacttactgcagcctttgaaaactttatggacatgcacagcccgcaagccgtatcagctggcatggcatacgatggcagaaaccagggcgatgacggcgacatcgatcgcatactgaaaaccatctgagacaaggccggagaaatccggctttttttatgggtcctttccggcatatggacccgttacggggcggcgacctcgcgggttttcgctatttatgacgtttttccgtgaaggtgacaccaccaccacttgattaatatttaaccatgcagttaaggtaacattatgattgataaagcttgttttgtaagtcagcaggaaatagctgaacatttcaaggttaacagaaccactattcgcgcatggaccaaacaggggatgccgtatcttaatgcggatcgcggaaagtctggcggttatcacatcgggcatacattgctttggtcttcaggtaaaagccgtcttgaggccatcagatatcacgtagaaaccagtgcgctggaaaaaattatgtttgccaggctgctttcatctgagcgtgacgagtactccagtgaagaaacagaacatcgatttgatgaaggtttgcagatttacggctattcaccggaagatgtgagcaaggcacgaaataaaatggctggctttctggctgggtggcgtcatgccgtaagcgttcgccgtgccagcatggagcaatcagccgatacagaacagtaaagccgataacttgttaatcactcgcagcaatgcatgtgatttgtgcacactttcggttaactggttcgatgtccggttttagtgtctgttttttgcgcatgtccggttcatggaaagcatgtttttatatttttcatatggttaacttgcagagaaaccggacatggatcccgaaaaattttcataaatagtgaaaacgcgcgaggtcgccgccccgtaacgggccataattccaggaaggacccgacgacaccagactatcagaacgatgggggcacaatgacagaagccgaaatactgcgattaatccgccgcgttgccggaatcagccagcaggccgacgaacagaccacgcagccggacagcgtgaccgccgaaaattatgttcgtgtggttgctgaggtgattcgccgtaatggtatccagcttaatgatgtggatatgcgcaacatacggatccgcgttcttgaaatgctggcctacaatcgccgcgtggcactgtatcgggaaacggagaaaattacgtaccactggaagaagccggagcggttgcggcggtaactggttgatattttcgaaattcgccagcggcgaacatcggggaaaccagcctaacccgttgatattttcgggaacctcaaattgaagaggtcggaaacataacccgtcatattctggatgctgataattaccacgcagcccattaaggcctaacccgttgattcttccacaatcccccattgggggaggctgggcggcctgctgtgggcttttccaccattggtggaaaggcgcacatctggatcatcattacggtgatcaagggtatgtaaaacccaccagcctgattgacatttaaccggaaaaaagccaggtagccccgttatggggatccccatatcgacattaacgcccctcatgaattggcgcgcttccccctggaaagatgacccgcctgtatatttcttgtgtctatttgttccacgttgtttcatacagtgcaacgatcggtgtagttaatggtgtagtcaatttgcgatttttagcactttttgcagtgcaaatcatttaattaaatcaatggcttgccttgatgtagtgataaaaggacatatttattcatctttcggtg

SEQ ID NO: 20 - DNA, 8040 bp, Escherichia coli
aagaccgtaacctatgacttcgaacgtctgatggaaggcgctaagctgctgaaatgttcagagtttggtgatgcgatcatcaagaatatgtaatcactacatgtgttaaatattgtaacgggcgtataacacgcccgttgttttatgatgatgtaaaatcttccccaaaacccttccccaaaactggctattttctatgctgttttgatatctacgataatccagtctttaccacgatcatcattgtatcggtcggtcatttttctggatttatgacctaacaacttttgcgtatccagaccctgttcccgatataaccgttctgacagagatcgctgctcatgaaatgtgggcgcagttcctggctcccattttatgccacatttttccctggcctttttaaaagccgttgtaagagtatttgcagacacctggtctcctctgtttgcttgagaggtagtgtgacggtaatggaccagatatttactaacaacagcatccctgcactgagatataacttcacgaagggtaatattcagagcatcgcatttcaggttaagcggaatagcaagttttgaaccggttttttcctgagtaatgtgcaacatgtcgtcccagatatcagagaatttcaaattgcagatatcgcctaaacgttgtccagtgacaagagcaagtagcatcccgcattttaaatagggctgccgtctgcttacgctgtcaaatattgcctgccattcgggcagtgataatctttggcggtttactcgatttcgcggttgttttgttgcctgcgctgggttaaatcctggcggaacatgtcctgcgtgttgtgcttctttgaagacgtcgatcaacaccattctcacgacttgcgccatcctgttatgaccttcagcctttacagcatcaattatttcggcaatatcaagtgcggtaatatccttgaggtgttgcattccacaatgctcacggaaaagacgaatgggtttgcctttttgccgataggagttgggtcttagttcattatgttgcagcctgtcctcctggatagaaatatatttatcaagccattctgtcaccgtaatgtctgagcgcctgcctttcattctttctagacgctcattgacgcttaatatttgtcgggtacgttgttcagcaataatggtatttgcttcagtagcaacttgttttgcttcattctcatcagttcctaagctatgaaaacgaccggatagtggatgtttgtattgccaatatacctttccggttcgcttatctaatttgcaatataaattgggtatagagattttgtgagatcggggtctagcagccatcagcgattatccgttggagttttgggtttgcgtttattgggagttgcggttctgcaagcgttcctacaaaacgggaatttcggtcaatctgaaccgccccgggaatcctggagactaaacttcctgagaaagaggtaaacaggatgactaaaaatactcgtttttcccccgaagtccgtcaacgggcagtccgtatggttctggaaagtcagagcgaatatgactcacaatgggcgacaatttgttccattgctccaaagattggctgtacgccggagactctgcgtgtctgggttcgccagcatgagcgggataccgggggcggtgatggagggctcaccaccgctgaacgtcagcgtctgaaagagctggaacgtgaaaatcgtgaactgcgccgcagtaacgatatccttcgccaggcttccgcttattttgcgaaggcggagttcgaccgcctctggaaaaaatgatgccactgctggataagctgcgtgagcagtacggggtcggaccgctatgcagcgaactgcatattgccccgtcaacgtattaccactgtcagcaacagcgacatcatccggataaacgcagtgcccgtgcgcagcgcgatgactggctgaagaaagagatacagcgcgtatacgatgaaaatcacaaggtatacggtgtgcgtaaagtctggcgtcagttgttacgggaaggtatcagagtggccagatgcactgtggcacgtctcatggcggttatgggacttgccggtgttctccggggtaaaaaggtccgtacgaccatcagccggaaagccgttgccgcaggcgaccgcgtaaaccgtcagttcgtggcagaacgacctgaccagctgtgggtggctgattttacttacgtcagcacatggcggggcttcgtctatgtggcgttcatcattgatgtgtttgccggatacatcgtggggtggcgggtctcatcgtccatggaaacgacattcgtgctggatgcactggagcaggcgttatgggcccgtcgaccgtccggcacggtccatcacagtgataaaggttctcagtatgtatcgctggcctacacacagcggcttaaggaagccggattactggcatcaacaggaagtacaggcgactcgtatgacaacgcgatggcggagagcatcaatggtctttacaaagcggaggtaatacaccgtaagagctggaaaaaccgtgcagaagtggaactggccacactcacgtgggtggactggtataacaatcgacgattgctggaaaggctgggccatactcctccggcagaagcagaaaaagcttattatgcttccatcggaaacgatgatctggcagcctgagttcacagataaaacactctccaggaaacccggggcggttcaatcatccagtagcgaccaacttttatagcgggtggggccatcattttcccttgcgcgtattttttcagaactcgctcacttggtgctaagtccccaaattcttctttagcccagtcctgtaaagtgattagtcgagacatttgtcctcctcttagctgctgagggagtttgtgaccgatatatctgacatgatattaagctcatggcaggtacatctcttgactggtcatagagataaatttaatgctgagaaatgcagtattgaatttatcaatttttctatttcctgcgtatggcacgtaacttcttaatgtgttctgctgtttcgatctcttcagctatccgatctgcgtcagctttattcacaggttcaaagtcatgattaaagcggaacatgctggcgatacatgttctgccttttcggatgtagtgaactttgttgtgagtggaacgcaggattttgcagggagtgccgtggtggtcgacgtaccaggtgttagggtaaatcactctgaacattcttgaccttgtgttgtgcggattgttattcagtgccgatatttacctttatcgcgtatacctttaccggtttatcaccgaagtgcggatgtgtgattgtcttcacttcatatccgtcatacggaacatcaactctgcggctggaatcgtcgcgcttcggatatccctttgtgataatcaggcggtcatgcttacggttaacgaggcgctttttccagtagtcattacacaggcgatactcttccgttttctctccgcgaatcatggcatcgaagtattcacctttaacggcaagttgcaggttagccacggttaactccttgctgtgtggcgtcgagtaataaatcccacaaccgctgagagcaatttccgcatgtacagcgttgacccacaacgtttatcgcgttgctgatttccggcgttacctgtttaggaaccataacccaaccatccggagttaccggaagcgagaacggcagcacatctctgtgaacaagtttttgctgtgacaggttatccagaactttctgtactgctgcatcaccgaatacaccaagcgcatctgccataactcctacaacctgataagcctcagcgcataccgtggataaaccatccggaattaccggagagttgccgggttctttaatgtgcaagcgaggctcaccatcttttggctcaggccactggcgctccatgttgatcttcaatttatcttccatagcaacggtaatttcagcatcgctgatgccagcacggcgctgtgcatcccacaacagaaactgcatatcagcccactcgctaagatcgtctggttcggctgcggcttccagtgcctcttttgagaggtgtttcagtggaccaatggggccaacgcagccaaatgtggagtcagaccatttggcatgctcgtggcgaatctgttcgcgttccagtgatgccagtgcaattcgtgctagttccatttgttcgccacgagtaagcccgttttcaagcggatttttaatgaacaattcaatacgttctttggtaatagtggtcatgtgttaatcctcaaaactttatgcccgggcgcaaaagtacgtgttttgtctttgcttattcgccacccgtctttacgggcctcttttgcacaaccagaccatgacgtaccgatatactcaccgaagtctggcactggatatacaccttccgtacactggcgacaatcacaatagagatgcatggtgtaacttgcggcaatagccatatcactctctttttccctgaagcatggcagcgtggcaggcatcctctacgcccttaactgcatctgcgcagtagttatagcgattgcattccactaacttctgcctgagattttcaattgcttgcgcgacatcagcctgtattacaggaactggcggaacggctgtctgctgctctcgaacgtcattagtcgctatcggttctgctgccaactgactggcatatttgttaatggtaacgataagctcttgctcagcctcatccagacaatcaccgatacctcgcctgtcgccgtcaaaatcatcgaaatcagcacgaactctggcaaatttcaggattgcggacaacacctcaccaggaattaccggagagttggttgacgtttccgaaatttcccgaaaattattggttgacgaattcgcgttttcccgaaagtttccggcatgaagcatagccgcgcggcaggcgttccagcctctcacctctgcaatagcggcaacagcatcgaccgcgtacatgctaagagggttaggcattggtttttcttcaggtactactggcactggcttggcatatatagcggctgaacataccaaccctttgataaccaactgtcagcaatgtttttactcctcgttattgccggaatacctaagccattgtctgaatgcagccatgccaccggattctcttccagcgatgccagagcaatttcataagcccggcgctcaacattgtctcgcacatccaaactgctgatacgctctttgatttctttaatcagttctttgtcggtaaaagtgctcatatcaatctccattggtatcaatgtttacagcctgacaagactctttgagcacccagtcaatagcgtctttccatgcctctgtttcgactggtggattttcacgcttaacctgttcatagaagcgcactgctttaaccagtccttccggtactactggtgatggctgtttagcttctaaatcagcaattctgtcaaccacggcatcgacagcatctgaaaagccgaaccagttgctccactccggctcatccccggttgctgcaaagtacatatctgctaaagcagattcagcatggtcacgctcgttaatgagttgcttattagacgtcaactagttttgccgactcgcgccaactatactggccgcacccttcagtgcgacatcaagtcgcgcttgttactgccttcgctgtctttttcctgtagctttcacctttcagttcgaacatatatccgtgatggatcagccggtctgccgccgccaccgccatagtctcatccacgaagatgctgccccacatgctgaacggatggttactggttatcaccaggctcccacgttcatagcgatgcgctattaactcgaacagtactcccgtttcggcgctgtcgcgtttgacatagccaagatcatccaccactatcacccggtagcgatccagtttcagtagcagctcattcagtttcaactgcgctctggctttacgtagttcctgcaacaactctcctgcgctgtagaaccgggcccggtagccctggcctactacgccatccacgatcgctgccgccagatggcttttccccaacccgctggctccgaacagcagaacgttttctcctgcatcaacccagtctgtcgtttcacagagttgccggaactgagctccattcagttccggcacctgactgaagtcgtattcgcttagcgttttggcaactggcaaccgggcctcctttttataacgacgcagtttttcactctcgcgccacaggagttcttcattgcatagcgtcagaagatagcgcgatggtgtccagccttctgccagtgctcgtttttccagagcgtgccattcagctccaactcgtgtcaggcgtagtttacgcaggctgcgttcaaggtgatggatattgctcactgcgaacctcccttgccacgcagtagttgctcataactgctcaggttatgctgtttcacattgactaccggcaacgccttttcctttatacccaggaagcgcatcagccggtgcagatccacgtttcccggggtattcagcatctgctccataccttttgccacgactgagatatcgtcgtatcctgcagccagtttcagagcatgtaccatcagcctgcctgccatgtcgggttccagatgattacataagcgacgccacagcctccgccattcatcgtctggcaggatgtcatttctcagcgttgcatggcagaacgcaccgggcttttttgccagactgtcgatcacatgtcggaagtcgatacgacgggcccgcgtcttccctttttctggtctgacacgtgggcagctcatgacctcgctgctgccaacgtaacagctcagacgatcgtcccataaccggacccgtaacagttgacctacaagccgggaaggtacgctgtagacgacgtgcttcacattgatggtactgctgcggctaaccctcacagtcagctcatcatagtcagcactgcgacgaagcggcagcggtttcagatgaagacgttcttccttgaccagatcctgattgttacggttgtgccgcataacctgctgagtgatgaaggcctgatattcttctatggtgctgaagtcgttactgccccgcagtatcagcgcctgacagatacgccttttcagatgtccgtgggcactttcaaccgagccattttcgtggccccgaccggcattattgtgtacgccctgcattccgtagtgctgacagagagcagcataacgctcagtcagctcgcggcgtccatcttcgccctgttgtttccatgctgccctcaggctgtccgttttatgttctaccggcactccgcccagttgtccgagggcttcctgcagaccttcagccagagcagagaagctctcaccacccagcacaacccgcatccagctccagtggctccattccagacggaagtgatacaacttatgcgccaacaacttaccggcgatggtgacaactacacctttcagttcagtaaagtccgacagacctcgcagaccgggctgatgtcgctggcggaacatgacctcctgctctgcaccatactgtagcttccattcgcggacccgccgttgcattgttcttcgaaggctgttggggtactggccgggatatttatcctgtagcatctccagcagagttgttggtgtcagagccggcctctctttcaacagaggaacaagcatgctgtcccacacagcttccagaggatctttgcgtgtgcgccagtgccgaacactgttttttgcccactctcctttttcgatccgacgaccagaacggactgagataccagccttcatggccgagatatgctgagttatacctttcttacgctgagtcatatagtaactgacctgagaagtattgagcgtcacgccatttcctgttggatcatgtaaatgacactcaggttacaaaaccggccagaataatcggcgccaggcggactgagttattgtcgtctcatag

SEQ ID NO: 21 - DNA, 16001 bp, Escherichia coli
tattagacgtcaactagttttgccgactcgcgccaactatactggccgcacccttcagtgcgacatcaagtcgcgcttgttactgccttcgctgtctttttcctgtagctttcacctttcagttcgaacatatatccgtgatggatcagccggtctgccgccgccaccgccatagtctcatccacgaagatgctgccccacatgctgaacggatggttactggttatcaccaggctcccacgttcatagcgatgcgctattaactcgaacagtactcccgtttcggcgctgtcgcgtttgacatagccaagatcatccaccactatcacccggtagcgatccagtttcagtagcagctcattcagtttcaactgcgctctggctttacgtagttcctgcaacaactctcctgcgctgtagaaccgggcccggtagccctggcctactacgccatccacgatcgctgccgccagatggcttttccccaacccgctggctccgaacagcagaacgttttctcctgcatcaacccagtctgtcgtttcacagagttgccggaactgagctccattcagttccggcacctgactgaagtcgtattcgcttagcgttttggcaactggcaaccgggcctcctttttataacgacgcagtttttcactctcgcgccacaggagttcttcattgcatagcgtcagaagatagcgcgatggtgtccagccttctgccagtgctcgtttttccagagcgtgccattcagctccaactcgtgtcaggcgtagtttacgcaggctgcgttcaaggtgatggatattgctcactgcgaacctcccttgccacgcagtagttgctcataactgctcaggttatgctgtttcacattgactaccggcaacgccttttcctttatacccaggaagcgcatcagccggtgcagatccacgtttcccggggtattcagcatctgctccataccttttgccacgactgagatatcgtcgtatcctgcagccagtttcagagcatgtaccatcagcctgcctgccatgtcgggttccagatgattacataagcgacgccacagcctccgccattcatcgtctggcaggatgtcatttctcagcgttgcatggcagaacgcaccgggcttttttgccagactgtcgatcacatgtcggaagtcgatacgacgggcccgcgtcttccctttttctggtctgacacgtgggcagctcatgacctcgctgctgccaacgtaacagctcagacgatcgtcccataaccggacccgtaacagttgacctacaagccgggaaggtacgctgtagacgacgtgcttcacattgatggtactgctgcggctaaccctcacagtcagctcatcatagtcagcactgcgacgaagcggcagcggtttcagatgaagacgttcttccttgaccagatcctgattgttacggttgtgccgcataacctgctgagtgatgaaggcctgatattcttctatggtgctgaagtcgttactgccccgcagtatcagcgcctgacagatacgccttttcagatgtccgtgggcactttcaaccgagccattttcgtggccccgaccggcattattgtgtacgccctgcattccgtagtgctgacagagagcagcataacgctcagtcagctcgcggcgtccatcttcgccctgttgtttccatgctgccctcaggctgtccgttttatgttctaccggcactccgcccagttgtccgagggcttcctgcagaccttcagccagagcagagaagctctcaccacccagcacaacccgcatccagctccagtggctccattccagacggaagtgatacaacttatgcgccaacaacttaccggcgatggtgacaactacacctttcagttcagtaaagtccgacagacctcgcagaccgggctgatgtcgctggcggaacatgacctcctgctctgcaccatactgtagcttccattcgcggacccgccgttgcattgttcttcgaaggctgttggggtactggccgggatatttatcctgtagcatctccagcagagttgttggtgtcagagccggcctctctttcaacagaggaacaagcatgctgtcccacacagcttccagaggatctttgcgtgtgcgccagtgccgaacactgttttttgcccactctcctttttcgatccgacgaccagaacggactgagataccagccttcatggccgagatatgctgagttatacctttcttacgctgagtcatatagtaactgacctgagaagtattgagcgtcacgccatttcctgttggatcatgtaaatgacactcaggttacaaaaccggccagaataatcggcgccaggcggactgagttattgtcgtctcatagttgctcttcgcttttctccagttcagcaatacgcttacccccatccgagataacaccttcgtaatactcacgctgctcgttgagttttgattttgtctcctcaagctcaactctcagcttcccaacagtaagagcaatatcctcgttctcctggtcgcggcgttttatgtattgctggtttctttcccgttcatccagcagtgccagcacagtagccggattggctgcggcgatgaattcagcattggcctgctgttccatttggaaatcttcatcgaaaccgctttctggatgcgctccttcaattctgcaaatgggaatatatccagcaacttcacgatgaattagcgcataatcaccatcaaatcggctctctccatattcgagcgaccactcaccacacgttgctttttctgccgcttcacgcagtgcctgatagttaatttcgctcacttcgaacctctctgtttactgataagctccagatcctcctggcaacttgcacaagtccgacaaccctgaacgaccaggcgtcttcgttcatctatgggatcgccacactcacaacaatgagtggcggatatagtctggtagttcagacgacgcatttttattgctgtattgcgctgtaattcttcaatttctgatgctgaatcaatgatgtccgccatctttcattaatccctgaattgttggttaatacgcttgagggtgaatgcgaataataaaaaaggagcctgtagctccctgatgattttgcttttcatgttcaccgttccttaaagacgccgtttaacatgccgatcgccaggcttaaatgagtcggtgtgaatcccatcagcgttaccgtttcgcggtgcttctttagtacgctacggcaaatgtcatcgacgtttttatccggaaactgctgtctggcttttttgatttcagaattagcctgacgggcaatgctgcgaagggcgttttcttgctgaggtgtcactgaacaagccccatgtcggcaagcataagcacacagaatatgaagcccgctgccagaaaaatgcattcagtggttgtcatacctggtctctctcatctgcttctgctttcgccaccatcatttccagcttttgtgaaagggatgtggctaacgtatgaaattcttcgtctgtttctactggtattggcacaaacctgactccaatttgagcaaggctatgtgccatctcaatactcgttcttaactcaacaggagatgctttgtgcataccgcctcccgtttattatttatcttctcagccagccgctgtgctttcagtggatttctgataacagaaaggccgggaaatacccagcctcgctttgtaacggagtagacgaaagtgatcgcgcctacccggatattatcgtgaggatgcgtcatcgccattgctccccaaatacaaaactaatttcagccagtgcctcgtccattttttcgatgaactccggcaccatctcgtcaaaactcgccatgtacttttcatcccgctcaaccacgacataatgcagtccttcacgcttcatacgcgggtcatagttggcaaagtaccaggcatcttttcgcgtcacccacatgctgtactgcacctgggccatgtaagccgattttatggcctcgaaaccaccgagccggaacttcatgaaatcccgggaggtaaacgggcatttcagctcaaggccgttgccgtcactgcataaaccatcgggagagcaggcggtgcgcatactttcgtcgcgatagatgatcggggattcagtaacattcacgccggaagtaaactcaaacagggctctggcgtcgttctcgtactgttttccccaagccagcgccttagcgttaacttccggagccacaccggtgcaaacctcagcaagcagggtgtggaagtaggacattttcatgtcaggccatttctttccggagcggggttttgctatcacgttgtgaacttctgaagcggtgatgacgccgagccgtaatttgtgccatgcatcatccccctgttcgacagctctcacgtcgatcccggtacgctgcaggataatgtccggtgtcatgctgccaccttctgctcagtggctttctgtttcaggaatccaagagctttcactgcttcggcctgtgtcagttctgacgatgcgcgaatgtcgcggcgaaatatctgggaacagagcggcaataagtcgtcatcccatgttttatccagggcgatcagcagagtgttaatctcctgcatggtttcatcgttaaccggagtgatgtcgcgttccggctgacgttctgcagtgtatgcggtattttcgacaatgcgctcggcttcatccttgtcatagataccagcaaatccgaaggcgagacgggcacactgaatcatggctttatgccgtaacatccgtttgggatgcgactgccacggccccgtgatttctctgccttcgcgggttttgaatggttcgcggcggcattcatccatccactcggtaacgcagatcggatgattgcggtctttgcggtaaatccggcatgtacatgattcattgtcctgctcaaagtccataccatcaaactgctggttttcattgatgatgcgggaccagccatcaacgcccaccaccggaacaatgccgttctgcttatcagggaaggcgtaaatttctttcgtccacggattaaggccgtactggttggcgacgatcaacaatgcgatgaactgcgcatcgctggcatcacctttaaatgccgtctggcgaagagtggtgatcagttcctgtgggtcgacagaatccatgccgacacgttcagccagcttccctgccagcgttgcgagtgctgtactcatccgttttatacctctgaatcaatatcagcctgatggtgagcaatggtttcaactatgtaccggatgtgttctgccatgcgctcctgaaactcaacatcgtcatcaaacgcacgggtaatggcttttttgctggccccgtggcgttgtaaatgatcgatgcatagcgattcaaacaggtgctggggcaggcctttttccatgtcgtctgccagttctgcctctttctcttcacgggcgatctgctggtagtgacgcgcccagctctgagcctcaagacgatcctgaatgtaataagcgttcatggctgaactcctgaaaatggctgtgaaaatatcgcccgcgaaatgccaggctgattaggaaaacaggaaagggggttagtgaatgcttttgcttgatctcagtttcagtattaatatccattttttataagcgtcgacggcctcacgaaacatcttttcatcgccaataaaagtggcgatagtgaatttagtctggatagccataattgtttgatccattttttgggactcctggctgattaagtatgtcgataaggcgtttccatccgtcacgtaatttacgggtgattcgttcaagtaaagattcggaagggcagccagcaacaggccaccctgcaatggcatattgcatggtgtgctccttatttatacataacgaaaaacgcctcgagtgaagcgtaattggtatgcggtaacgccgcgctcaggcggccttgatagtcatatcatctgaatcaaatattcctgatgtatcgatatcggtaattcttattccttcactaccatccattggaggccatccttcctgaccatttccatcattccagtcgaactcacacacaacaccatatgcatttaagtcgcttgaaattgctataagcagagcatgttgcgccagcatgattaatacagcatttaatacagagccgtgtttattgagtcggtattcagagtctgaccagaaattattaatctggtgaagtttttcctctgtcattacgtcatggtcaatttcaatttctattgatgctttccagtcgtaatcaatgatgtattttttgatgtttgacatctattcatatcctcatagataaaaaatcgccctcacactggagggcaaagaagatttccaataatcagaacaagtcggctcctgtttagttacgagcgacattgctccgtgtattcactcgttggaatgaatacacagtgcagtgtttattctgttatttatgccaaaaataaaggccactatcaggcagctttgttgttctgtttaccaagttctctggcaatcattgccgtcgttcgtattgcccatttatcgacatatttcccatcttccattacaggaaacatttcttcaggcttaaccatgcattccgattgcagcttgcatccattgcatcgtttgaattgtccacaccattgatttgtatcaatagtcgtagtcatacggatagtcctggtattgttccatcacatcttgaggatgctcttcgaactcttcaaattcttcttccatatatcaccttaaatagtggattgcggtagtaaagattgtgcctgtcttttaaccacatcaggctcggtggttctcgtgtacccctacaacgagaaatcggataaactctattcacccctacagagagcaaaagagaaacgccgatgaacaactcatggtggcaggaactaatgcattttttcctgcaaggaatgacacttaaacagttgattcatatgctaatcatcctgatcatattgattattgttatgccggtaagcgtaaaagaatggataaacctgcatagtccagaaatccttcctcattactggatgtattacatcctgttgttttgcgttagctatgtgcttaacggcgttgttaattccgcttatcacgctgtgactgaaagaattgaggtattcgctgctcagaagcgcaaatctaaagaagaaaaatatgtgcaagatttgtttgattcgttaactcttggagaaagagcgtatttggcattcgctgtagccgctaataaccagctacaaacggaaaagggcgctcatgaatcaatttcattgctcaaaaaaggactcctcgttcgaaggcctcctgctgttggatatcctgataccgaccgtttcgttatccctgaaagctatagacatgagtgctacattaggtttgccgggaaggcagacagccttatggatgaacttatcgctcaggataagcatggcaaaaacaagtaattagcaaatgaatttatcatctcgccgtcagttgttttgatttccggtagcctgccgcgtaaagagctacgttcggaagacaagttgaaccttcatattttctggtcaacgttgtcagagttatcacttctgctctcattgctggtttgagcttgcattgcaagaccactcgtgaaggggttggcctgtgtagcttgtcggagctgatcgcctcctgactttgcagatttgcgcgacgagctctacggcgagaagctgcggtgcctttaaattctgtttttctggacatggattcctcccgaataaactttggcgatgcaatctcgaagctcctcctgagacggttgcttcggcattgcatcccacagcttatgtggttgggtgatctggcttttcagccacgtagtcgagagtcgacgttgtttaaagagcctgccagtctgttccatttggcttccagcgtcctgctgacggttaaatagtacgatatgtactttacaagatcaatacaatttgttgtaagttggcgtggttttttataacgctttgtatttaatagtgttgttttttagcgtggatgtattgcctcggcgatgtaaggagagatcagaattgcgtggtttagtgggttgcatctatttatttttcaataaatataattggttatgtgtttttaggtgggcgaacgtgaggcaaagaaaacccggcgctgaggccgggttgtattatgctgcaagtctcttaacccaagtctctcttttggagaatggtagaacttggcttgattcatggaagagtaaggagagttgttgcatttgatcaccaattgcttcgctgtctataacaacaaatctgttgttatactcctcacttgaagctttaagatcaattagtttcccaagcaatgagtaagcactattccagcttcctccgtgtttcacgcttgatgtaaaaacgtatttaggtatgtcggtttttattgttacagggacggtaatttgatgtccactcaagccatatacgttttcacgaagagaaagtgcgtctctaagctctgtgtgatatagataatcaataaccatactttcaaacttttcagcttgaactggctgataccagtctaacgacaaagttgatgcgagtataccagctctaattatgttcgatgtaatcgcaccgacatccttttctgttgcccaagcaatgatttctcctcgagcattgagttctgcgccttctttaagcagtaattgtcgtatctcatcaagtcgttttttggtaagcgagatccctcttgcctccatattcattaaggcatcgcatctgtcactaactaaatacctaccattgacttcacggataaaggcaccgacatgctctccatcatcacagtaagtgaatggactgataattctcaaggtcttgcctattggatggcattcgaaacctagttgtgagatcactgttgagcacatcatattccaaaccccatttgccccgactcatcttcaagcggtaaaggtattctcccagagtaagttatgttcagatgtttacagaagtaattccaataccctaccaggtcatctgggtttatgtcatcttcgattggaaacgctattctatcactatagtatccagcttcttcatagtatacatggtagtgagcaccgtaaatgatatcttggtacttcggatgatcgaccttgtaactattcgtgtgtttgtcaaagtgataggtatctaccgcgaaaaccctcttgttatgatagaaagcaataatatttattttagggtaagaaatcgggtcatcaggttctgaatcctgatctggtttccatttcagttcaaactttagcccttgtataggtatacaatcctcatccaaggggatgatatgggcttgtagccacatatcagagcgacttggtttctgtttccatttaacgccagaaaagttaactatttttttacaataaagtactttatcaacttctacttggcttggctgataatcatctatttttgccaatgtttaccgccctgtaaattgtagataaaagtggtttcatcacccaaacgtctcttcaggccattggctggcgataactttccccacaacggaacaactctcattgcatgggatcattgggtattgtgggtttagtggctgtagaaacacctgaccgctatccctgatcagtttcttgaaggtaaattcatcaccaccaagtctggctatgcagaaatcgccgggctcaacagcttgctcagggtcaaccagaattaacatcccgtcaggaaagctgggtttggaacctgttggtgcggtcattgagttaccttcaacctcaagccagaatgcagagtcactggcttttttggttgtgcttaccaatctctccgcatcgcctttggtaaaggttctgagttctggagagaacatcccagcctgaacatgagaaaaaacagggtactcatattgtttttaactggggccgatgagtattcgccacaggtgaaaatgtcccgcgtgggtgaatgatatgttatcaatccaaggtttttaacaccccccaatatcactaagagatggatgacgagatccgcgcaaccagtgtccaatcccaccctgcgtcatacctagctcttcggctaacttctcttgagttatgccgagctctttcattctggatctagccagttcataccatttcattttcatgtccttattattacgctctgtactggaaccatccatgcacaatgtgtatttttacttgtattcgcaaagtacatattgtattttttttattcgtgtttactatggagggcatatgagcaacctacgaaaatatcgagagtcactgaatatctctcaaacaacacttgctaaggcagttggatgcacacagggagctatcggacattgggaatctggtcgtcgcttcccagaccttaaaacatgccgtgctcttgttgcgtgcctaaacaagttaggcgcaaaagtcagtcttgatgacgtgttcccgccggaacacaaagccgcttaataagcggatccgctctttgtaacaacggacattcgtcctacgtcgctgaaaagcgagttccaagatatctgaccaactaaggccatatgcgtttccacgcatacctttcaactaactattcactattggaaatcttaagaaatggaaagaacaagttacagcaaactatcacagcgtgacgttgatcgcgcagaaacagatttacttatcaatctgtcagctattacccagcgcggtctggcaaagatgattggctgtcatgaatcgaagataagcagaacggactggagatttattgcttcggtcttgtgtgctttcggaatggcatcagacatcagtccgattagcagggcttttaagtatgcgcttgatggactcaccaataaaaaacgcccggcggcaaccgagcgttctgaacaaatccagatggaattctgaggtcattactggatcaatccacaggagtcattatgacaaatacagcaaaaatactcaacttctgcagaggtaactttgccaaacaggagcgtaatgtggcagatctcgatgatggttacgccagactatcaaatatgctgcttgaggcttattcaggcgcagatctgaccaagcgacagtttaaagtgctgcttgccattctgcgtaaaacctatggatggaataaaccaatggacagaatcaccgattctcaacttagcgagattacaaagttacccgtcaaacggtgcaatgaagccaagttagaactcgtcagaatgaatattatcaagcagcaaggcggcatgtttggaccaaataaaaacatctcagaatggtgtatccctcaaaacgagggaaaatcccctaaaacgagggataaaacatccctcaaattgggggattgctatccctcaaaacagggggacacaaaagacactattacaaaagaaaaaagaaaagattattcgtcagagaattctggcgaatcctctgaccagccagaaaacgacctttctgtggtgaaaccggatgctgcaattcagagcggcagcaagtgggggacagcagaagacctgaccgccgcagaatggatgtttgacatggtgaagaccatcgcgccatcagccagaaaaccgaattttgcagggtgggctaacgatatccgcctgatgcgtgaacgtgacggacgtaaccatcgcgacatgtgtgtactgttccgctgggcatgccaggacaacttctggtccggtaacgtgctgagcccggccaaactccgcgacaagtggacccagctcgaaatcaaccgtaacaagcaacaggcaggtgtgacagcctgcaaaccaaaactcgacctgacaaacactgactggatttacggggtggatttatgaaaaacatcgccgcacagatggttaattttgaccgtgagcagatgcgtcggatcgccaacaacatgccggaacagtacgacgaaaagccgcaggtacagcaggtagcgcagatcatcaacggtgtgttcagccagttactggcaactttcccggcgagtctggctaaccgtgaccagaacgaactgaacgaaatccgccgccagtgggttctggctttccgggaaaacgggatcaccacaatggaacaggttaacgcaggaatgcgcgtagcccgtcggcagaatcgaccatttctgccatcacccgggcagtttgttgcatggtgccgggaagaagcatccgttatcgccggactgccaaacgtcagcgagctggttgatatggtttacgagtattgccggaagcgaggcctgtatccggatgcagagtcttatccgtggaaatcgaacgcgcactactggctggttaccaacctgtaccagaacatgcgggccaatgcgctgactgacgcggaattacgacgcaaggctgccgatgaactgacctgtatgacagcgcgaattaaccgtggtgagacgatacctgaaccagtaaaacaacttcctgtcatgggcggcagacctctaaatcgtgttcaggcgctggcgaagatcgcagaaattaaagctaagttaggactgaaaggagcaagtgtatgacgggcaaagaggcaattattcattacctggggacgcataatagcttctgtgcgccggacgttgccgcgctaacaggcgcaacagtaaccagcataaatcaggccgcggctaaaatggcacgggcaggtcttctggttatcgaaggtaaggtctggcgaacggtgtattaccggtttgctaccaaggaagaacgggaaggaaagatgagcacgaacctgatttttaaggagtgtcgccagagtgccacgatgaaacggatattggcggtatatggagttaaaagatgaccatctacatcactgagctaataacaggcctgcaggttgaaccgccccgggaatcctggagactaaacttcctgagaaagaggtaaacaggatgactaaaaatactcgtttttcccccgaagtccgtcaacgggcagtccgtatggttctggaaagtcagagcgaatatgactcacaatgggcgacaatttgttccattgctccaaagattggctgtacgccggagactctgcgtgtctgggttcgccagcatgagcgggataccgggggcggtgatggagggctcaccaccgctgaacgtcagcgtctgaaagagctggaacgtgaaaatcgtgaactgcgccgcagtaacgatatccttcgccaggcttccgcttattttgcgaaggcggagttcgaccgcctctggaaaaaatgatgccactgctggataagctgcgtgagcagtacggggtcggaccgctatgcagcgaactgcatattgccccgtcaacgtattaccactgtcagcaacagcgacatcatccggataaacgcagtgcccgtgcgcagcgcgatgactggctgaagaaagagatacagcgcgtatacgatgaaaatcacaaggtatacggtgtgcgtaaagtctggcgtcagttgttacgggaaggtatcagagtggccagatgcactgtggcacgtctcatggcggttatgggacttgccggtgttctccggggtaaaaaggtccgtacgaccatcagccggaaagccgttgccgcaggcgaccgcgtaaaccgtcagttcgtggcagaacgacctgaccagctgtgggtggctgattttacttacgtcagcacatggcggggcttcgtctatgtggcgttcatcattgatgtgtttgccggatacatcgtggggtggcgggtctcatcgtccatggaaacgacattcgtgctggatgcactggagcaggcgttatgggcccgtcgaccgtccggcacggtccatcacagtgataaaggttctcagtatgtatcgctggcctacacacagcggcttaaggaagccggattactggcatcaacaggaagtacaggcgactcgtatgacaacgcgatggcggagagcatcaatggtctttacaaagcggaggtaatacaccgtaagagctggaaaaaccgtgcagaagtggaactggccacactcacgtgggtggactggtataacaatcgacgattgctggaaaggctgggccatactcctccggcagaagcagaaaaagcttattatgcttccatcggaaacgatgatctggcagcctgagttcacagataaaacactctccaggaaacccggggcggttcaggtaatcgcaggcctttttatttgggggagagggaagtcatgaaaaaactaacctttgaaattcgatctccggcacatcagcaaaacgctattcacgcagtacagcaaatccttccagacccaaccaaaccaatcgtagtaaccattcaggaacgcaaccgcagcttagaccaaaacaggaagctatgggcctgcttaggtgacgtctctcgtcaggttgaatggcatggtcgctggctggatgcagaaagctggaagtgtgtgtttaccgcagcattaaagcagcaggatgttgttcctaaccttgccgggaatggctttgtggtaataggccagtcaaccagcaggatgcgtgtaagcgaatttgcggagctattagagcttatacaggcattcggtacagagcgtggcgttaagtggtcagacgaagcgcgactggctctcgaatggaaagcgcgatggggagatcgggctgcatgactatcaaatcaaatacgccagcacacgacaaggactgctggcaaacgccgctttggctttttgatgcactggatattgagtttggattctggctggattcggcagcgagcgacaaaaatgctctgtgcgctcactggctaactgaggacgacgacgcgctcaattctgagtgggtaagccacggtgcaatctggaataacccaccgtacagcaatatcaggccgtgggtggaaaaagccgctgagcagtgtatacaacagcgacagacggtagtgatgcttgtgccagaggatatgtctgtcggatggttcagcaaggctctggagagtgttgacgaagttcgtattatcactgatggacggattaattttatcgaaccatcgacagggctggagaagaagggaaacagcaaaggctccatgctgctgatttggcgaccgttcatcagtcctcgacggatgtttactaccgtatccaaagcggcattgatggcgatcgggcagggcgtcaggagggctgcatgagacgacagcgacgaagcatcaccgacataatctgcgaaaactgcaaataccttccaacgaaacgctccagaaataaacgcaagctaatcccaaaagaatctgacgtaaaaaccttcaattacacagcccacctgtgggatatccggtggctaagatatcgtgcgaggaaatgacaatggattattcacagttaagtgattttgaaattaacagaatggtaggagacataatttttaaaggcctttgggcaagtaaaccggaaacatcagggaataacaccaacaaatggtattacggaaatgctgatacaacttttgagccattaaatcatttgcctgactactgcaatgatccgagcgcttcatggccgattattgagaaatacaggatttctatcttagaccagttaactgaatggtgtgtggatgcaaaaggcgtaagcccaatatttgataccagacctctccgcgccgccatgattgtctttctcctgatgcaggaggccaataatgcttagcccatctcaatcccttcaatacctgaaagaaagcatagagcgggcttcaatgtgcacagagtggattctatctaggtttagcgcatacagaagattgccggtaaagggcatgccaagcaagtcgatgctgcatatgcaaaagaatgcgcgctggaaggtatggcgagaacacag

SEQ ID NO: 22 - DNA, 9393 bp, Escherichia coli
  misc_feature (6583)..(6583): Unsure
  misc_feature (6708)..(6708): Unsure
tatcaatatcaaaccgggccatgattattatttttacatccgcagtgtgaacaccgttggcaaatcggcatttgtggaggctgttggccagccgagtgatgatgcatccggctatctgaattttttcaaaggagagatagggaaaacccatctggctcaggagktgtggacgcagattgataacggtcagcttgcgcctgacctggctgaaatcaggacgtccattacgggtgtcagcaatgaaatcacgcagaccgtcaataagaaactggaagaccagagtgcagcgatccagcagatacagaaggttcaggttgatacaaataataacctgaacagcatgtgggctgtgaagctgcagcagatgcaggacggacgcctttatatcgcgggtattggtgccggtgttgagaatactcctgacggtatgcagagtcaggtgctgctggcggcggacaggattgcgatgattaatcctgcgaatggcaacacaaagccgatgtttgttgggcagggcgatcagatattcatgaacgaagtgttcctgaaatatctgacggctcccaccattaccagcggtggcaatcccccaacgttttcactgacacctgatggtcgactttctgcgaaaaatgcggatatcagcggtaacgtgaacgcgaactccgggacgctcaacaacgtcacgattaatcagaactgtcggattctgggaaaactgtcagctaaccagattgaaggtgatattgtcaaaacggtgggaaaagcctttccgagaaatggcagttatgccagcggtacaataacggtcactgtgtacgatgaccaggcttttgaccgtcagatagtagtcccccccgttctgtttcgtgggggtaagcatgaaaacttcaacagcaacaaccaacagtcatactggtattcaacctgtaagctgcaggtactgaagaacggacaggaaatctttcagcaacccgcgacggatgtcagcagggtattttcatcagtcattgatatgcctgccggacacggccatgtcaccctgactttcaatgtttcttcatatggtgctaataactggacgccaacgaccagtatcagcgaccttcttgttgttgtgatgaagaaatctacagccggtatcagtatcagttgaattttataacccagatacgggcgccagaaatggcgccttttttatttgtggagtgaatatggcagtacagatttcaggcgtgctgaaagacggtgcaggaaaaccgatacagaactgcaccattcagctcaaagcaaaacgtaacagcaccacggttgtggtgaacacggtggcctcagaaaatccggatgaagccggacgttacagcatggatgtcgagtatggccagtacagcgttatcctgctggttgaaggttttccgccttcacatgccggggccatcaccgtgtatgaggattctaagccggggacattgaatgattttctgggcgctgcaacagaagatgatgttcgtccggaggcmctgtatcgttttgaaaagatggtggaagaggtggcacgcaacgctgaagccgcctctcagagcgcagcggcagcaaagaaatcagaaacagcagcgggcatcgtccaggaatgcggcgaaaacatcagagacgaatgcaggtaacagcgcgaaagcggcagcttcttcaaaaacagccgcacaaaacgcagcaacagcggcagaacgttcagagacaaatgcccgtgcgtcagaagaagcctccgcagacagtgaagaggcttcccgccgtaatgcagagtcagccgctgaaaatgccggagtcgccaccacaaaagcgcgggaggccgcagcagacgcaacaaaggccgggcagaaaaaggatgaggctctgtcggcagcgacacgggctgaaaaggcggcagaccgcgcagaagtcgcagcggaagtgactgcagagccctatgcgaatatagtgccgccgctgcctgatgtgtggataccgtttaacgattcactggatatgattgcgggtttttctccgggctataaaaaaatagctattggtgacgatgtggttcaggtcgccagtgataaacaggttaatttcagtcgcgcatcaacggcaacatatatcaacaaatctggcgaactgaaaacggcggaaattaatgagccgcgatttgagtgtgatggcctgcttattgagggacaaagaacgaactacatgctcaattcggaaagtccagccagctgggggaagtcatcaaacatggatgtgcccgaaaccgggacagatagttttggttttacttatggaaagtttgtctgcaacgattctctggttgggcaaacttcggctattaatatggcatcaattgctgcaacaaagtcagttgatgtctcaggcgataacaagtacgtgacaacctcatgccgttttaaaacagaacgacaggtaaggttacgtatacggtttgataagtatgatggtagtgcaacaacttttcttggcgatgcgtacattgatacgcaaacgcttgaaattaatatgacaggtggggctgccggcagaattacggcacgagtcaggaaggataagaccacaggctggatttttgcagaggcaacgattcaggcaattgatggtgagttaaaaataggctctcagatacagtattctcctgagcggggtggggcaacagtatctggtgactatatttatcttgccaccccacaagtagagaatgggccgtgtgtatcatcatttattatttcaggaggcagcgcaacgacaagagccagtgatttggttagtatccccaccagaaataatctttataagttaccatttacttttttacttgagattcattaaaactgggatattgcaccaaacgccgcaccccgcgtgtgggatatagcagcagccaataccgggcaatcagcaattgcagcaatcaacagaggtagtggtaagttatatatgagtctgtcaaacccttcaggcttgtatgttaatagcgcagcgacagatgtatttgcagagaaaaccacatttggatgtattgcaaaagctgatggtcactttcatgtggtgacaaatggtaaagcggttaatgaagtttattgtgaatataatggtgtgaccgctgataaaaatatccgatttggagggcagacgaatactggagaacgacatctgtttggccatattcgcaatttccgcatatggcataaagaattaaatgacaggcaattaaaagaggtcgtatgaaagatttaactttgaagtttcatgacaaactgcagtttaaggccttcctgtcatctcttgactgggaggaggatgaagacctccagaataaactgttagtcgatgaaattggtttcacctacacagaaacaggggtaacagaagagggagaacctgtctgtgtccggaatgacggttattttgtcaacattcgcattcttgatgacttgtttgatgtttctgtattctctgattatgtcgtggagctggaaacaccgcttcgggaatggagctgaaaggaggaaataatggatataagccccttacttcatgcgctttgtgctgtggctgcgcagatactggttggtctttttaccggaaactgggcttacggagcgatagccggttgtacgttcttcattgcgcgtgaacatacccaggcagaatatcgctggattgaaatgttcgggcatggcaagcgaatgaatatgccgtggtggggcggttttgatccgcgagcttgggatgtggcaagcctgatggattttgctgtgccggtggtggcgtgtctgctggtctggctgttggttaatcgtgggtgaaaaaaggtgagctgtatatgcaacggaggaagaaaccccgttgctggaagccaggaaaaagtatcgggtgttgctgtcctcggatgttgtgctaattgggtgataacagatcctgtgtatgggagtttccctttttgcgtgcgttgatgctggtaacggcaaacgtcatgatgaacaaaaccgcgaataagacgacaatcgtcggagctggtgcgctgtcgataaaaaaggacaaccagacaccagtcattgacactattaccgatatgccagtcgccagtaggagcgcaatatgaaagcgttgtgtcaggagtaccgcaatggcgccaggcgcaatgagcagagaaatggagagaatgatacctaccgctttcagcgtcgccacaatggtcagagagaccatgcacagcagcccataatgcagccatctcgtatgcaaaccgcttacctgcgcctgttgataatcaaagctgaacagcaaaaaatcccgccattttacgctaataacaagtgtaaccagcccggcaataatcatcgtctggattatatcgccgatggttatcccgagcatgtcgccgaaaagaatatggtcaagatgtacgtctggtttgactgcaatatacaagatcagacctgcggcaaacatgccagaaaaaacaatccccatcactgtatcttgcttgattcggctgttgtctttcaggtatcccgtcgccaccgcgcagaatactccggcgacgaatgcccctgtagccaaaggtaaccccagaatccaggcaagcacgattccaggaaaaaccgcatgactcatcgcgtcacccatcagtgcccaacctttcaggaccagaaagaccgacagcagcgcacagggtatggaaactaccagtgaaatcagcagtgcgtgactcataaaggtgaactgcagtggctccagtaataatgccatcatgagcgatcctccagcgccttatgcgcacgccgacgatttgccaaaagcccatgggtgggcgcaaagacaaatgctaaaagaaacagcagtgtctgcgccaccacgatgattccacctgtcgcgccgtccagaaagtaactgacccacgcgccgaggaaactagttacactgccaatagttacagcaatcatgagcaggcggggaaaacgatcggttaacaaccatgctgttgcaccgggagtcaccaccagacagatcaccagaaaggcaccaaccgtttgcagcgccgcaacggtcgaaaccgacagcagggtgaagaagatgagttttaatctgcccggatgcaatccaatagcacgggcgtgattctcgtcgaaaaaggtcaccataagatctttccatttgaaaaaaagcacgatgatcgagagaatgccaatgatagtgagttgcaggatatccgccggatcgattgccagaatattgcccaggacgatggtctgaatgttcacagatgtcgggttcaatgacaccataaacagccccaggccaaaaaaggacgagaagatcagaccgatgatggcatcttcttttaagcgggtgcgttggttaagaaacagcatgctgcccgcagccagtccgccggaaaagaaggctcccagagaaaacggaagccccagcatatatgcccccgcaacacccgggacaatagagtgcgacaacgcatcgccaatcagcgaccagccttttagcatcagatagcatgacaggaaagcgcagagaccgccgaccatcgccgagacccacatcgcattgagcatatattcatagctgaagggttccagtagcacgttcatctttcttccctctgcaccgctgacggtcgatgagccacaaaagggcgttcatcgtcagtaataatgctttcttccgagccgttaagtgtgacatggcgcagtacgccgctaaaagccagctctaggttctcggctgtaaaagtggtgtctgtcggcccgcttgccaggacggtgcctttgaccatgaccgtataatcgcaaaatgtcgtgacggatccgagattgtgtgttgagacaagcatcgttttgccttccgcgcgtaactccctcaacaggctgatgattttggcttcggttttcacatcaacgccagtaaaaggttcatccagcaggatcacatcaccctgctgtgcaatcgctctcgccagaaagacgcgtttcttttgtccaccggaaagctcgccgatttgtcgatggcgaaaattcaccatatcgacacgttccagcgcatcggtgacaatttgacgatccctctttttggcgatacgcaacatacccatatgcccatagcggcccatcatcaccacatcttccaccagtacaggaaatgaccagtcaacatcttctgactgagggacgtaggcaaccaggtttttctgtaacgcctgtcgcgtgggaatacccagaacagatatctttccgctggtcagacgcacaaatcccataatcgctttaaacaacgtcgattttccggaaccgtttaccccaaccagagcggcaatagatccacttggtactgtgaaggatgcatcgcgcagtgctgtgtgcccgttacgccaggtgacagtaacatcattaacgacaatgcctgcagattgcatcattatttctccttttcccagctttaattccctgtccagcgtctggtagtaccttaagaaggtcgatatacgtcggtaccgggccgttttctgtgctcaggnaatcgacatagagcacaccgcgtagtgtgcgccggtttcacgcgcaacctgacgcgctggtttatcggaaatcgtactctcgctaaagactgccgggatatgatttttcttaactatatcaacanccttacgtacctgctgcggtgttccttgttgatcggcattaatcggccacagataaagctcttttagccccaaatcgcgtgcgagataagaaaaagccccttcactggtgaccatccatcgctgattctcagggagttccgtaatctgcttacgcaggggggcaagggtttgggtaatcttggctttataagtatcggcattgcgttggtaggtttgtgcatttgccggatcgtattttatcaacgcatcacgaatattatcgacgtaaatcagagcattatctggcgacatccatgcatgggggttaggtttgccctcatagggtccttcggtgatccctacaggcgtcacacccgaagagacaattacttctggaaccccattgagatgctggtaaaagcgttggaaccacaattccagattcataccattggcgagaatcagttgtgccccctgcgcacgtttaatatcgccaggggtaggctgatactcatgaatttctgcaccaggcttggttatggatgagacttctgcagcatctcccgccacgtttttggccatatccgcgatgatggtaaatgttgtaatgaccttgaatttttcagttgcacttgcctgaaatgcgatcgagcaggtgagtgcgaggccccccaagagcatggttactttttttatcgagtgcataatttagtacctatagtgagcaaaattagaacaaacatagcaacggctatgttttatagcacaacctatacaaaatgaaaatgattatcattagcggttttgaggcccaaaacagggattaggttgtttccggctggcgacgcgttattgaggaaaaaagtaaggcagctagtaggctttgaaataacgttttgcggttggctgatgcaatttcgagagtgcatgtattgaatgatttctagccgttactgattttcgtattttttgtatgggaggatttgcacctctccccaccgagcctccatgactttactccactgtctctagggctgctgtgtgccaggagcggaagcaggggggccagagactccttaaaagttgatagctcgttttgcagggagacttacacggtaagcgttattccgaagagcttaaaattgaagcagtcaaacgggttgttgagcgtgtttatgcgctgccatctgattaatcgacggaagcagttccgtttggtctatgatgcagttgtccggcaggcgctctgtgacgcaaaagaacgataggagtagcattgaagtgaacgaggttatgcttgtcttatattatcctctattttaaaaacatcagctggttgtgtaagagtttttattgttttatcttgttgactttgcttttatgaaaacagagtgattgatacaatgaaaaccttaagtgggaaagagtttaggaaattatttaatcgttatgagacaggattctatctaagtgagtttgaatacttaaaggactttgatcctttgtttcctgaatgcgtagggaaagaattaaagttgggttataaacgaaaagttgatgtatggtgcgaagaggatgctgcgctatatgcagaatttatagctacaaaagaaaggctgaaaagaggccggttaatcctaaaaataaaccaagtgtggtcgcgtgtatatcctgcttatatttatgcaattgaagaaagaataaatgtcagggcaaaggggagagagtcatttaagtatgaaactgtgcaagaaaaacaatgtaaactttccataatgttagatggtctgaaagaccttgaatgtgaaatagctatgatttcaagtgagtttgaaattgaaaaacactctatgcactatttttatatgatttttgatattgaacgctatataaatgactgcagttactttgttttttctgctgctaaagttgttaaaggcgtgattcaatgcattggttacattgacaaaaataacaaagcaagttgcgatgaattttattcaggcagctatgaatgcttggatgatgatcaggaaacactgaactatttaaatgaatcatgcgcagagggtatagacgctgataaagatctcatcaggaagaatgagttattagccttatccctgaaggaattgtatcaacttctcgtttcaaaaaaataacaagtaatacggcgagcgatatgacgtgccatgggatatccgcacccagcagcatgttgtctccacgatgtccgcagttcgctcataatagacattcactacagttatagtagaaggtatgcatgctgctgagtggggaaagtgtgaaagaaaagaagacagctgctttgtttgtcgtcacgtttatcttcattggctatgcaagtcgtaatacaaggcgggacaaaactgagacacataaggcctcgcaatggcttgcaaggccacacatgtattgagatgttaataaaatgtagacttgtaattttgatataaatggtagagaaaatctttccccaaaataaaaacgaacgtcaatgaaatcaaacggttgaataaagttgattttggctaatacaaagacaagaaaataatatttatgattaaatatcagcgagttgaatacataatttttatatactgctgcgccacatggggtgggttgaagcggctgacttaattgttaaaggtatggaaggcgcaatcaacgcgaagaccgtaacc

SEQ ID NO: 23 - DNA, 158 bp, Escherichia coli
ttccagacggatgacaaacgtataattgcctgatgcgctacgcttatcaggcctacgtgtttttttgcaatgtattgaatttgcgatactttgtaggccggataaggcatttacgccgcatccggcaaaaatgagtcctcctcaaacgaggaggacta

SEQ ID NO: 24 - DNA, 6732 bp, Escherichia coli
ccagaaattgcgaccttcttcaataaacccttcactgtaggcatatttggtatcaaacaggttattgaccgacgcattaacgctgaagccatgacctaaggtgtaatcggctcgaatgtgggtcaccgcaaaaccggcggctttttgtgaaccgtcactgttgctgtagctggaggaacgcgcctcttccgacagcgttacgcttaacggctcccacggtttgagagtcatccatgcggtcattgtctgcgttggcagatcggttatcttgccgatgtctttgcgtttggcatcagcgtggatcagggcgtagctcaatcctacatccagtatattgctgattttccccttaataccggcatccagaccgctgtaatccaccgtgccgctgttctgattttgaatggtatcggcatcgatattgtgcgagaggatggcatcactcacccggttatagtaaacgctgacctcaaatccccagtcgtgcgtgaaggcaccattccaggttaaatccaccccgcgcgcgcgttccggcttgagctgcgggttaacaatcgctatctggttatacgcaggtttggacgtggtatagcgttctttcagcgtcggaaagcgtgtgcggtcatagtacgaaagcgccagcgtgtcttcattggcaaagtggtatttccccatcacctgccagttaaaagctgactgattgttgtcgtcataatgggtgatactgccatctttctcatgttttttcgcttctacgctatcgcgccagtcatagctgattccagccacgacatcgacattatcggcagcagcccattgatattcactggcgagcgaccaggtacgatcttcatagcgatcgtaagcggcgtgcggcgcacctttttcccggtgtacgtcatctttccagttaacggcaaacgacagcagatcgttttcacgcacatcggctgccagttgtaacccggcaccgtcgctgtaatcggaataatggctgtagctgccttttttatttttcaaatcagccagcgagttgtacatcattagcgtattttcaaaggtgtcgtgatacagccgacttttcagggtaaaacgatcgtttagttgggtcgttccctgataataaaaactttctttgtcatactctggccactgccagtagcgtgatttctgaccactatttccactgtatggcgggttatctttttcaccatcctgcttaatgtaagtcaatgtgtattcatcgttttcgcgtggtgtaaaaccgagcttcacaatgccgcgtttatcatcagccgatgaattaatcatcttgccgtgtttgcctgcaatatcattatttacaccatgcggcaggccgagaaaatcctgctttagctggctaccgctgacttgcaaataccccagatcgctgctggcggcaaatgaagcatgcatatcgtaggcattgttctggctacggctccatccctgacgatatcccagactggcttccagcggtttagtcggcttctgggtggtgatattaatggctccgcccatctgattaggcccctgaagcagcgacgaataccctttggaaacttcaactgcccccaaattgttggtcagaatccgcgccagatcgaggttgccgtcatagggaacataaatgggcacaccgtcgaaatagaccggcacctgacgactatcaaagccacgaactttgacctgttcttcgttgcggctacctgacttttgcagcaccacgccggggacgacacttaatgcctgagcgacattctgtttatccagggccttcatggtgggttgatcgagaacggtggttgtcgtcgatgataccggactggaccatacggtcagcgtgtcactctcctgagccgctacggactgctgggtaaaggcaagtgataatactgtgcagagataacgttttttgagtctcatagaataaattccgtttaacaaagaattaaatagaggctgcgggttgcagactgactttaatgtcagcaggtgccgcgtaataaggcgcggaggtaataaaaaggcgaatgccgcagtcgaggtaatttttgagtgttgtcagattaattccgccggtcagagccagcgtgcagtggggagccagcgacggtgctatttgcgcaatttcagttgcctgttgcggactaaatttgtcgagctgaagtacgtctggttgcgcgcgtaacgcggcgattgcctctttcggcgtgtcggcttcaacaactattttcttctcgggtgcgtggcgacgtaactgattgattgcgcctgaccagtcctgattgtcatgaagaaaatggcggtggttggcaaacaataatatggtttccgcacatccggcacgatgaatcagtcctccggcagccagaattgcctgcgaggccagtaagcgggtgcccggaattgcttttcgggtgcaggcgatattgccatcagggtaacgttcacgaagtaacgccagcatttgagcgagataatcagaaacaccgcaactccactccagcacattctggactgccttccatccctgatgaagtgctgcggcattaccttgcgcacggattagccgctgacccgcgttcgcttgtgaaccgtcgctgaccgcgtcatcaatagttaatcccagcgtagttaacatcttacacgcgacagaaattccgctgacgcagccgccctgacggagaaaaaactctatatagccatgctggtgtccaatatttaatgctcgcgtggtcaggtcaccgccctggatatcttccagaagtaacgcatcgatttgtgcctgagaaaggaaaatcatcgcagtgtctcctgcggtacgctatcccaccagatgagcgcccagtcgcggctggcaggggcgagggcacgagcatcttgttgttgataccagcgatataaccgctcacgctcatcgtcgttaagcgcgcccagactccagctgacgttctgctcaaaacgttcccaggtgctgttatcctgttggcaattttgtccacggataaaatcaacgtgagcataaattcccatctgatacaggacgttgagcgcaaagatatagttgggtaattcgatcacttcccgaccagccgcccgctgaatggctggagagacgaacgaggtgctgaccagatgagtcgtatagacgcgaagccgtgcctgattattcagtttgctcattgcctggcgcatatcagccaccagagtggagcgggaagccacggcaatatcgcagcgtggcaggtcactccagtcctcttcccaggcgcgctggatccagtggacattgtctgcctttagcgcggcggcgcgacgggcggcaacgttcagcatcccctgactgtaatcaacgccataaatcgtcgtgagtttgtccgccagcgccagcgatacggtacccggtccgcagcccatatcgaataaggtttgcgcgccttgcaggtcaatttttgaggtcagttgttgcaggtagctgtccgtaggcgaggcgcaattttccgccattttttccgcccgttgatcccagtgatccggcgttttttctgtgcgatgggccagcctgagttgctgaaggtaaaggtctgcaaaatcaatatcgtcaatgagcatgatttttccttagtgcttaattgcagagaggtgatggtgaatctggtcggcagaaacccggtacagggcagccagttttttcgttgttaactgttcggtcggtaagccttgtgttactcgtccatctggctctacctggataatgctgtcggcaatggcgtttgcatggagcggatgatgagtcgacattaacattgtcatgccgttatttttgagctgcgccagcgtgtccagaagttggatctgatgaccgaaatcgaggctggaggcaggctcatccagtaataacaagcgcggttgctggacgagtgcacgggcgattaaagccagctgacgttcaccgccgctaagcgtattccagcgtcgtgtcgccagatgcaaaatgcccagcttttccagttgctccgttgctttcaggcgttcttgcttaccgggaacggaaaaagcgcctatggtgggggccaggcccatcaacaccatatccagcacactaaaagcaaaaatgccgtcgtgcgcctgcggcacccaggcaatagcctgcgcgcgctggcgatggctgagtgtctgcacagggaggctatccagtaagatctcgccttttaataacggtataacgccaagaatggagcgcatgagtgtggttttgccgcaaccattggctcctaacagacaacaaattgttccttgcgacagggtgaaggacacgtcgcgtagcaccggatggcgggagtaacccagagacgcatgacggacggcaagcaaagtcactggcgacctccgcgtaacaacaaaaacaggaaaaacggtgcgccaacaaaagcggtcagaatgccaagtgggatttctgttgttccaatgctgcgtgccagcgtatcggtaagcaggagcagaatcgcgccagtacacattgccatgggcaacagctgctgatggttatgaccggtcaacaagcgggcaatgtgcggaacgaccaggccgacccaaccaattatgcctgctattgctaccgtgctggcggtgatgagtgtggcgcagacaatcaatccaaagcgcagacgtgtcacgttcagtcccagcgaacgggcttcgtcgtcggaaagtgtgagtaaattcatgcgccagcggagaaaaaacaggggcaaggagcctatgagaatgatcggtgcagcatagcagagatcgcgtaaggtcacggtggacagcccccccagcaaccagaaggtaattgacggtaactgggtgtaaggatcggccagcgtttttattagcgatatccccgctccgcacaacgtgcctaatgcaatacctaccagcaccagggttaagatcggagcgtggcgggtcacccgacgcgtaatcaaccagacgcccgcgaccaccatcagcccgccgcaaaatgcgtacagctggatgtaaacaatggataatccgcacaggattgccgcgcaggcaccaagtccggcaccggcggagacgcctaaaatatccggtgacactaagggattacggaacattccctgataggtggttccggcccctgccagcgccgcgcccagaaacagcgcagcaagaatacgcggcacgcggatttgccagaagacaatttgttcttgcacaggaacattttcttgacgaagaatgagcgccagcagttgctgcatatcgagatgataagccccacttacggcggcaaaagtgatactgatagctgccagcagcaaaatacatccgtttacggttctcattagctcgccaccaatttttgatagtcggcgtcactgagtgaacaatgccagaacagttgggcgtaatgctgcatgtcacttttaaactggcgattgatggcgggatccagccaggcgtgaagtctgcgtaatcccagaagacggttgattcccggcggggcatccagccagccaaagggcaggccacttaaaaataagatgcgttgttccgcaaccgctttcacgccctgccagagaggatcacgacgaataaaatctgcagtaacggcctcctgaaccagaataatatccggctgccagcgcaggagattttccatggaaacctgtgtcagaccgtggcgatcggctatttgcgcgacgttatgcaaacctaataattccgccgcctcggtatgcaacgaaccctgtaagcccgtttccagccctcgaggaccgcgcgcagcataaaagctgaggttagcggcgggtgaggtggcgaatgcctgagcttcaccaacgaagcggctggcgagattggcttgttctgcggcgcggtgctcttcgcctaacgttttgccaagcgttgttaactgttctgctgattgttccagtttcccgttaagcaataaccagggtatttgtgtctgttcgctaacctgccgtgcctgggagatccaggtttcatccgtattgccgcaatcaacgaccaaatcgggatgtaacgccataagcccttccagcgagagtgtgctggcgcgcccggcgagtcgtcccagcctggggaactggcgaatgtgctctggcaatggaattaatgcctgacgggcaaaatcaaaagaggaaaaaccgaccattttttctggcgcgacagccagcaatagtaaatcggcgggcgcgcctgcgctgacgatgcgtgtaatgttttgggcttcgggaagcgtcagtgaggcccagaatttgactgattgtgcaaaggacggcagatgatgcaggaacaatgtcgacgcaagaatctgtgtaaacctccgtctggttagtgacataagttatatcctgataataaaaaccgctatatatttacatatatatcgaaaaaaatcatgtttgatgtcaaaatttgtctaaagagacagaatgatttgcttgttgcttaaataacactttgttccacaagaaaattgtcagggagaatggcggagtggcgaaaaatataaatagaggtgtaatgattaacaaattgataaaataaaattaaaatcttctctgataaaagaaaataaaggcatagaccgtagaatggggggcatttcgtggcgaaaaaagagcaatgccaattttatgcacataatggcattgctcgatatacagcaaa

SEQ ID NO: 25 - DNA, 404 bp, Escherichia coli
agcgggagagtatgtactttcccgctatgaattgctaattaatagcgaccatgactgccgtgatttggtccaccatttgaaggtggcattggcttacctgagggcgcaggaccacgagggccatcgctgtggcggtgatgatggtggggaacacaagcactcaacaggcttgcaaagacaattgctaacaggctgaaggtaaatgtttttttcatgacaaactcttgaacggttaatgcactgtgattgttatcacataaaagctgcattgttaatattgtcaggagtctgattatgagttttggtaactcagaattgaaagaagacgcgtagcaggcgtaaaaaagccattacgtgcaactcacataatggctcgttattaaccgccagggtagtattagcgg

SEQ ID NO: 26 - DNA, 6989 bp, Escherichia coli
ttatctaaaccaaacatcggtggttacacactgccgatttttcggattgtagggaaacgtacttcatctatatgattggtccacctatggagcagtgaaggagcactgaccgtggctcgacctaatcaaccgacgatctccgcggcgttaaaaataatcgccacggggatcgccttaccccctgatcaaatcacttctcaacaactggatgttcagttaaataagccagttggctatgttgagcgacgttccggtatttgctggcgctattttgcccgcaacgacgccagccaggccgaactggcggcagaggctttacataatgcgttagtagcggcagccttaaatcctactgatattgatctgctaatttgtgcatcggccattgccgtacaggcattaccctgtagcgcaattcatattcttaaagccgcagccatgcccgcaggcgttgccgggtttgatatcaacagtagctgtgtgagctttatttccgctcttgaagtcggtgccggattattaaactgtggagcatatcggcgcattgccatcgtttcggcagatattgcttcacgaggtatcgactgggatcatgaagagtcttcattaatttttggtgatggcgcggcgtgcgcgattgttgagcggggcgatgggcgcagcgggattatcgctagcctgatcgaaatgtatcccgaaggcagcgaactgtgtgaaatacgcgccggcggtacgcggcgtaatcctcgttctggtgtgagtgatagcgactttctttttcatatgcaggggaaaccgctgtttcgttttgcttcttcgcttattgaagattatttttctcggttgctgcaaaaaagcagcctgcaactggatgatatcggcacggtcgttccacatcaggccagtcatctttcccttgaacatatgcgtaaacggctgcgagtgccggaatctgcgctcatcgatgtgtatcgtttttacggcaatcaggtcgcggcctctatccccacggcgctgcatgaagcagtgattagcggtcgtttcacagcggataaacctgtaatgttgattggcacggcagcgggactaacgctggctggcatggtgcttttaccgtgaagatcctcgtaacaggggcgaccagcggccttgggcgaaatgccgtgcaatatttgttgcaatcgggtgagtcggttgtggcaacagggcgaaattgtgaggttggcagaagcctgacaaacgcaggcgcacagtttgtggctctcgatttaaccgaggcatccgaggatgactgcgcccgcctgatggacggctgcgatgccgtctggcactgtgcggcaaagtcctcgccctggggcgacaaaacggcgttctggcttgccaatgtcaaagtgacccacactctggcacaggcggcaggcaggctgaatattccccggtttatccatatctccacgcctgcggtttactttgattttcaacatcacaatgacctgccagaaacgtatcttgcgcgagcattctccagccattatgccagcagtaaatatgccgctgagcaggttattgctggcgctgtttctcgatattctgccacgagatttattcttttgcgtccccgtggtttgtttggcccccatgaccaggtaattgttcctcgtctgatgcagcaattgcaacagggcggtggttgcttacgtttgccgcgcgggggcgacgcgttattggatctcacgttcgtgcaaaacgtggtgtatgccatgcggctggcaacgaacgttgaaggcttacgctcgggcagtatttacaacatcagcaatcaccagccgcagcagctatcggtgatgcttgacgccttgctgcaccagcaactgggcttgagttaccgcattgctgctgttccctggtcgctgctttctctggtcgcgcgtggcctggaactgtacgggaagtgcgttaatcaggaacctgttatcacacgatacagcgccggaacactctgtttcgatatgacgctgagtgcgcaaaaggccattacagagctgggatatcgaccgcgcttttcgatggaacaaggtattgcaatcacgggacaatggctgagggaacatggcaaaaataaccgcatttgaaacgggctggtgtacccatattagctgtattgcgctgaaaggggcagggctgaaagtgtgcaaattccccgcccgcgcctggctgctggaggtgggcgacaaacggtggctgtgggacacaggctattcatcgtggttcgaacactacacgcaatctggtgtgtttcgtctttatcgtcaggtcacgccggtttatttcgatccgcaacaggcgctggtgcggcaactttctgccaccggcctcgcagcgaaagatgttgatgcgattattctgtcgcattttcacgctgatcatattgctggtctgcgtgattttcctgatgtttcctgcatctgttctggtgaaggctggcggcaagtaagaactctgcgtggtgtcactgcgctgcgccaggcctttgtgccagggctaatcccggagaattttgactcctcactgcgctttattgaaagtttcgcatcggtgaatttgcccgcgcaactggcaccgtttgagtgcggctatttgctgccagaaagcaatggcgaaattattctcgtgccgcttcccggacatgctgccggacatattggcgcgtttgtgttaaccgacaacggctggactttactggctggcgatgcggcatgggcgccagctaactaccgggagctgcgagggccttcaccactggcgcatctggttatgtccgacagccacgcctactaccacacgcttgggcaactccatcagctttggcaaaacggtgtagtggagattcgtttgtgccatgagggggatttatgatcccgttggctttactctggcgctactttcgtacccgcaagctgcatttcaccgatcgcgaggcactggaaaactggcaggcaaaaaggctgcatcagttccggcaaaatgtcttatctcatagcccgtggtttcagcgttatctgacgttgccctttaatcagtggccaatgatggataaagcgttaatgatgacgcacttcgatgagatgaataccgcaggtttaaagcgcgacgaacttctcgattgtgcaatgcgcagtgagcagagtcgtgatttcaaaccctgcgttggcaggttcagtgttgggctttcatcaggtacatcgggtcgtcgtgggctttttgttgttagcccgcacgagcaacagatgtgggccgccggtgtgctggcaaaagtgttgcccgacggtttatttgccaaagagcgggtggcgctgtttctgcgcgcggacaacaacctgtatcaaagcgtgaataatcgctggttaagtctcgatttttacgatctgctagcgccatttcaggcgcaactcaaacttctccaacagcgagcgcccacgattattgtcgcgccagctcaggtattacgcgcactggcgctggaggtgatggccggcgaattgacgctaaaggtcaaaaaagtgatttcggtggcggaagttctggagccgcaggatcgggaattactgcgcaacgtgttccacaatgtgggggaaatttatcaggcgacagaaggctttctcgcttccacctgccggtgtggaacgttacatctcaacgaagagtttgttcacattgaaccgcaatggctggatgagcaccgtttcgtgccgatcgtcacagactttacccgcaccacacagccgatagtgcgttatcgactggatgatgtgctggtggcaagcgaacaaccatgctcctgtggcagtgcaacaatggcgattgcgcgtatcgaagggcggcaggatgaccaactgcaactaccaacaagatccggcgatattcagaccgtttttgccgatgcctgtagtcgtgtgctggcaatgacactgccgctaacagtcgattatcgcctgctacaaaccgggtcagcacaattgacgttaatcgccgattgcgagctgtggatgctggagcattgccgggaggcgttgaatgccttgtttatacgccaggatatcgctgtcgggcaattaatttggtcgctggaaccgcaaactgtgccagtctcttttacagccaagcggcggcgcattgtgcgtcagtgggggcgggaatgagcaattcactgctacgcctgaaacagatgctgctgggctggggaactgttggggttatctacaactttagcgactacctgcaaggtgagggatatcaattaacaccgtcaataattgataattggatttcgttttccccctccgctgtgtggctgtatctctcgttttttttcattgtgccgttaggttatttatccacgccactttgccacctgcgctggctggcccgttcaatgcaaatttccgcactggtggcaggcgtattttatcttctctggcccacaaccatgcattatccctcgtttgatcagatggggatatccgcgggcgcactcaacaggctgatcgccattgactcaagccagaactgtttcccctccttacacgccgcgctaacgctgttggcggtatgggcgattgccaaaaaggggaaccgttggctgacgctaatgagcgtggtctgggcgatagcaatcgccttttcgattctgcaattacgcagacatttatttatcgatttagtaggcggcgcgttgctggcgtcgatttgcggttggatatgcgcaacatgcgagaaaaggaagacacaatatgagtgatttattattccccatcatatcgatggtgctgttggtgttagccgaagcaggcgtgttgcaattcaccgggcggcaaaaagtggactggctggacgttatttttaatatcaactccggtcatatgatgctgtggttatttcgctgcctggaagtgctctgctatggcctggtgatcaatcacttcagccttggactgtttgataatgcaccggtgatcctgctgtggttgtttactatcctggcgtgggatttcggcttttactggctacatcgctggcatcacgaaatgcgcccgctgtgggcggtacatgtggtgcatcatcagggggaacactacaacctgtcattaggcgtgcggaattcgtggtactcctcgttaacctcaatcccgttttttatgctgctggcgatgcttggtgtgccgttgcagatctttttggcggtttctattattcactatagttggcaattttttaaccataacgcactaacgccgaaactgggctggctggaaaaagtgctgatcacgccttcgcatcatcgcgtccatcatctgaatcaaaagcaatatgccgataccaattacggtggcacctttttgttgtgggataaacttttcggttcgtatagtgccgggccggaatacgacgtaggctacggcgtaaaaaatagtcgcttgtcctgtaacccgatgcgcgagagtaatctgccatttttacgcttaatgggctttcgctcatttggcaaagcgattgaaggtcgctaccagagttctccatgggcggtaggggcaggggtgatcctgctgtttatgctggtgcttggctacattcaacaatatggctatggcattgagtttattaccagcgagcaagccgtattatttgttctgctggcggcaggctccgttgcgctggggggcatgagcgacgggcagcattggggtatgattttgtggtgctctgtgacgttgtcactgctctattttattgtctatatgtgttcatggagtactctgctctggaagggattagtgggtattctgctggcccattgcctgttatttgtaatcggcgtaggacgtaaatcgctaaggaaacagtatgaacctgtttaatcccgacaggttaatcacttttcctgccgatgatccacaactggtgaaacaactgcaaagcggtacgaaagtttatctggcgaaatcaggcgatcatcggtatgccgacggctgggcattcgccaaaatggcggcgttgattattgcctgtttatgctgctatgcactggcgttgtctcaaagcctgtgggggctgtatctgttgtggtatctcgcgatgatgttttgcgccatgttgttagcggtcaatgtggtgcatgacgcttcgcatgatgcgtttttgcgtggtaaaaagaccaatgcccgacttaaccggtgggttgcttttcctatggggctagatccggactgctggcgggtgcgccacgttcgctttcatcacggttttaccaatattgaattttacgatccagacacagcagaaaatggcattcttcgccagacgccgtggcaacggtggcgaccttttatgcgccagcaacatcactattggccactggtcgccgcgctcacctttccctggtatatctgggtagtggactggctcgatcgcgcagggtttacgccggtcacgcgacatctggccctgcgaggctttgctggctggggatatttcttagccgggaaactggcgcattgtgcgctgtgtctgatacttccctggcttttgtctgattttagttttatgaccatcctgctgacttatctgctcagccagctgctggcgtcattgatttttgtgacgttgattattggaacgcactgggcgaagggacatacgcagttaccaccagaagagggcaaaatgcccgtgggcagactggcgcatacctttgttaccacctttgactggacgccgcaacctgcatggcttggctactggctgggcgggattaatctgcaccttacccatcatctgtttcctcactggcatcatcgccattatccggcgctaagccgcattattgcacaaattgccagccagcaaggtctggattatcagttgttgacgttagcggatttgttgaggctacagcagcagtttttacggcgaatgggggagaagccgaaggc

SEQ ID NO: 27 - DNA, 1111 bp, Escherichia coli
gtaatgccagtcagttaagcaactgactggctctttttcggggctgtggggtatttccagggcctctcctttaccactctcgggaaggccctttcccttcttgtcggtaatttcactggttgtcccatacttgcaagatcgcgcatcagctccggtatacgtcccggggaagcgtatggcgtccgtcatcgacgtcagcagatggcagacttttcctttgcgcgtcacggtcagcaggcgggctgtcacctcatttcccagtcccggccacttttttcgtgcctgcgggctgatgttcagcttcaccagatgatcgcctttacccagttttctgatctcttcatattgcgctccctttctgagagggatcatccagtggcggtgttctcccgccaggctccaggtatttaacagtcctggtgagtaataacctttatccattaacgtcagagtgttatcgccggtttgttctataagttgctcagcaagctcattttcgctgttcttcatcgtgccgaaggctgcagtcgtcagcagatggctggtcagttccatctggcagaccattttgacctgcgggtagagcgccgagttcccggcatgtgtctggcgggggaaggctgcatcgttctctggtgtatccggtgtgcgccagaacacaccatcgatggccagcagggtcaggccgcaccagtgcggatgcggcgtggcgttatgccagagctgcgctgttttcgtgaacacgcggcggacagcctcaattcccagacgctggcgggtctgaataacggcactgggggcaacgaaggggcgattgcccggcagcatgatgtccaggcgattcgcaatctggtgaagaggttctttacgctcaagcgccatgccaacaatacaccagaccatcatttcgaggggaagacggcgcttgtgtagcgttacagtacctgattcggcaaggcaacgagagatgagttcgggggcgaggtaatcccccagagaagtcagtgggttacgcagagaatcgtaacgggataccaaatcaagggcctgtccaatgagcataaaaaaatccggaaacgagtgagcgtttccggattcttacacagccact

SEQ ID NO: 28 - DNA, 7888 bp, Escherichia coli
gctttctgtagcggagagaagctgcggtacagagcattttgcgttatctactcctgacgcctgcaagggggaggttggggaaatatcttatagaatctgactatgaaactattcgtattagctccgataaatttgatgatgaaaacagaactggcgacaacaagtcgctgtctttctgatgaattgaccccaacttaatattgtcaactatcttcacagaatctccacaatctcttcattatcagaatatgcatcatgaataagataaaaatactttccattactttggagaaacgtataattagcaaaaatgagaacgatcattctcatcaagtgataggccaggagacagaaatgaccagcaagctggagatacgccacaaacagcgccaggatgaaatcattaacgccgcccgtcggtgttttcgtcgctgcggatttcatgccgccagtatgtcgcaaattgccagcgaagctcagcttagcgtgggtcagatatatcgttacttcgccaacaaagacgccattattgaagagatggttcgtcgtatcatcgactttcgtattgcccaaatggacattgacgcgcgtaccgatcacttcccggaagtccttgccttgcgtaaatccttaaatgaggacgacgacgcgctgatgctggaagtggctgcagaagccacacgcaacccgcgggttatggcaatgcttgaagaagctgacgccagaatgttcgctaacggttgtgcacatatgaaaagaatgcatccccatcttagcgacgagcacattcgttgctgcgttgaagtgtttgctaccatgatggaaggtacggtttatcgtcgtttaacaccgcaaaaaagcgatccacaacatctgcaggaaatatatcaggatattgttagtatgttgataaataaataagaacagaattaaccaatagcgggggatattaatcccccttatttcattgcgaaattcatttcgcgatgcgggttcgttataactgaatatccctgacatatcctcattaatttcaatgaggagggtatttctcaccctggagaaaataatgaagtatatagcaacatctgtagtggcaatgctgctcttatcgggttgtgataatacgcaaagtaacaattcatccccgtcagaaacagaagtcggcgttgttacgctcaaatctcaaccggtttcggtagtcagtgaattaaccggacgtaccagtgctgcgctcagtgctgaagtacgtccgcaggttgggggaattatccagaaacgcttatttaaggaaggtgatctggtcaaggctggacagcctctctaccagattgatgcggccagttatcaggctgcatggaatgaagcccgggcagcattacaacaagcacaggcactggtaaaagccgattgccagaaagcgcagcgttatacccgactggtgaaagagaacggtgtttcacaacaggatgctgatgatgctcagtctacctgtgcacaagataaagccagtgtagaggcgaaaaaagccgcactggaaactgcgcgcattaatcttgactggaccacggtaaccgcaccgatttcggggcgtattggcatttcgtcggtaacccctggcgcactggtgaccgcgtcgcaggatacagcgttaacgactattcgtggtctggatacaatgtatgtcgacctcactcgctccagtgtcgatttattacgtctgcgtaaacagtcactggcgaccaacagtgacaccatgagcgtctcacttattctggaagatggcacaacctacagcgaaaaagggcgtctggaactcaccgaagtcgcggtggatgagtctaccggttcggtgacattacgggcaattttccccaatccacaacagcagttattaccgggaatgtttgttcgcgctcgtgtcgatgaaggcgtgatggaagacgctattctcgcgcctcaacagggcgttacgcgcgatgctaaaggcaatgcaactgcgctggtggtgaataaagacaataaagtagagcagcgaacgctcgaaacgggagaaacgtatggtgataaatggctggtgctgaacggcctgcacaacggcgaccgactgattgttgaaggttctgccaaagtcacttcagggcagaccgtcaaggctgttgaagttcaggctaatggaggcaacgcctgatgttttcgcgcttttttgttcgccgcccggtctttgcctgggttatcgccattttgattatgttggcggggattctggctattcgcacattgcccgtcgcgcaatatcctgacgttgcaccgccgaccattaaaatttcagccacttatactggtgcttctgccgaaacgctggagaacagcgtgactcaggttatcgagcaacaactcactgggcttgataatttactctatttcagctcaaccagtagctctgatggttcggtcagtattaatgtgacctttgaacaaggtaccgatccagatactgcacaggttcaggtgcagaataaaattcagcaggcggagtcgcgcctacccagcgaagtgcagcaaacgggtgttacggtggagaaatcacaaagcaactttttgctgattgctgccgtgtatgacaccactgacaaagcctccagttcggatatcgccgactggctggtcagtaacgttcaggaccccctggcgcgtgttgaaggtgtggggagtctgcaagtctttggcgcggaatacgccatgcgcatctggctcgacccggccaaactggcgtcttactcgctgatgccttcagacgtgcaaagtgctattgaagcgcaaaacgtgcaggttactgccgggaaaataggggcattgccttcaccgaatactcagcaactgaccgcaacggtacgtgcgcagtctcgcttgcagacggtggatcagttcaaaaatattatcgtgaaaagccagtcagacggcgcagttgttcgtataaaagatgtggctcgcgttgagatgggcagtgaagattataccgctattggcaaacttaacggtcacccgtctgccggggttgctgtaatgctttcgcccggtgcgaatgcgctgaatacggcgacgctggtcaaggataagattgccgaattccagcggaacatgccgcagggatacgacatcgcatacccgaaagacagcactgaatttattaaaatctccgtagaggacgtaattcagacgctgtttgaagccatcgtattggtggtttgcgtgatgtatttattcctgcaaaacctgcgtgccacactgattccggcgttagctgtccccgtcgttttgctgggcacattcggcgttcttgcgttgtttggctattcgattaataccctgacgttgtttgcaatggtgctggcgatcggcttgctggtggacgatgccattgtggtggtagagaacgtcgaacgcattatgcgtgacgaagggttgcccgcgcgtgaagccacggaaaaatcaatgggcgagatttctggcgcactggttgccattgcgctggtgttgtcagccgtattcctgccgatggccttctttgggggatctacgggcgtaatttatcgtcagttctccatcaccatcatctccgcaatgctgctttccgtggtggtggcattgaccttgactcccgccctgtgcggttccgtcctccagcatgttccgccacataaaaaaggctttttcggcgcatttaaccgcttttaccgccgtactgaagataaatatcagcgaggcgtaatttatgtcctgcgccgtgcagcccgaacgatggggctttatgtcgtgctgggtggtggaatggccctgatgatgtggaagctgccgggcagtttcttacccactgaagaccagggcgaaatcatggtgcagtacacgctgccggccggggcgaccgctgcccgtacagcagaagtgaatcgccagattgttgactggttcctgattaacgagaaagcaaataccgatgtcatctttaccgttgatggtttcagttttagcggcagcggacagaacaccgggatggcgtttgtttcgttgaaaaactggtctcaacgtaaaggggcagaaaacaccgcccaggctatcgccctacgggctaccaaagagctgggcacaattcgtgatgccacggtatttgcgatgacgccgccagccgttgatgggctggggcaaagcaatggttttacgtttgaattgttagctaacggtggaaccgatcgtgaaacactgctgcaaatgcgtaatcagttgatagaaaaagcgaatcaaagtccggagttacattctgtacgcgccaatgatttgccacaaatgccgcaattgcaggtagatattgatagtaataaagcggtgtcattagggttgagtttgaatgatgtcaccgacaccctgtccagtgcgtggggcggtacttatgtgaatgactttattgaccgtggtcgtgtgaaaaaagtctacattcagggcgacagcgaatttcgttccgcgccgtcagacttaggtaaatggtttgtgcgcggtagcgataacgccatgacaccattctctgcttttgcgaccacccgctggctgtatggaccggaaagactggtgcgctacaacggctcggcagcctatgaaattcagggcgaaaacgcgactggctttagttccggcgatgcaatgacaaaaatggaggaactggcaaacagtcttcctgcgggaacaacctgggcctggagtggtttgtcattgcaggagaaactggccagcggtcaggcattaagtctgtatgcagtttctattctggtggttttcctctgccttgcagcactgtacgaaagctggtcagtcccgttctcggtcattctggtgatccctctggggcttcttggcgcggcgctggcggcctggatgcgtgatttaaacaacgacgtttacttccaggtagcgctattaactactatcggcttgtcgtcgaaaaacgccattctgattgtggaatttgctgaagcggcggttgcagagggctattccttgagtcgtgcggcattacgcgcggcgcagactcgtttacgcccaatcatcatgacctcgctggcgtttattgcgggggtaatgccgctggcgatagcaaccggcgcaggggcgaacagccgcatcgccattggtacgggcattattggcggcacgctgaccgctacattactggccattttcttcgttcctctgttttttgtactggtgaaacgtttgtttgccggtaaaccgcagccgtcaggagtaagttatgttgcgtcgttctcttatttttctggtgttgttgagtgcgggatgtgtctcgctcgatcctcactacagtacgcctgaatccccaatcccggcgaccttgccgggagcacagggccaggggaaggcaatcagccatgattggcagcaggtgatccacgatccccgattgcagcaggtagtaaccattgcactgaaccgtaaccgcgatgtgcaaaaagcgattgctgatattgactcagcacgggcgctctatgggcaaactaatgcgtcgttatttccgacggtgaatgcggccttaagttcgactcgcagtcgttcgctggcgaatggtacgggaacaactgccgaggctgacggcacggtgtccagttatacgctagatctgtttggtcgtaatcagagtttatctcgggcggcgcgggaaacctggcttgccagtgaatttacagcccagaacactcgtttaacgctgattgctgaaatcagcaccgcctggctgacactggcggccgataacagcaacctggccctggcaaaagaaacgatggccagtgcagaaaactcattgaaaattatccagcgccagcaacaggttggcacggcggcagcgacagatgtcagtgaggcgatgagtgtttatcagcaagcgcgcgccagcgttgccagctatcagacacaagtgatgcaggataaaaatgcgctgaacttactggcaggtacaacgcttgcggaaaatctgctaccgggaacactggaaagcctgccggaacaaatgataagtctggttcctgcgggagtatcatctgatgttctgctgcgtcgcccggatatccaggaagctgaacataatttgaagagcgccaatgcagatattggcgcggcgcgggctaactttttcccgacgatttcgctgactgccagtgccggtgttggcagtgacgcattgtcgtcgttgttcagccacggaatgcagatctggtcatttgcgccatcggtcacattaccgctgttcactggcggaagtaatctggcgcagcttcgttacgcagaagcacaaaagcgtgggctcattgccacctatgaaaaaaacgttcagagcgcatttaaagatgtcgctaacgcactggcgcggcggaccacgcttgaagagcaactggatgcacagcgccagtatgttaaagctgagcaacaaacggtcgatgttggcttgcgtcgctatcaggcgggtgttggtgattacctgaccgtgttgacggcgcagcgcagcttgtggagcgcacagcaggagctgctggcactgcaactgactgattttacaaaccgaatcacgctctggcagtcgctgggcggcggtatgtcatcactcaagtaaggaataatatggctagagtctctctttcatgggcattgattcttggtcttttagccggtatcggcccgatgtgtaccgatctttatttgccggctttgccggagatgtctgagcaactggcggcaaccacgaccataacgcaattaaccctgaccgcatcactgattggtcttggcgtcggacaactgttatttggccctctgagcgacaaaatagggcgtaaacgtccgttaatcttgtcgttgctattgtttattgtttcttccattttatgcgcgacaacgaacaatatttactggctggtggtctggcgttttattcaagggatcgcgggggcgggtggttcggtgctctctcgttctattgctcgtgacaaatatcagggagtaacgttgacccagttttttgcgctgttaatgacggtgaatggcctggcaccggtgttgtcgccagtgctgggcgggtacattgttagcacttttgactggcgcactttattctgggtaatggctgaaattagcaccgtactgttgctgggctgcctgttatttattaatgagaccttgccagaaaataaaaggggctcatcattgctattaaccggacgaagcgtggtgcagaaccgccgttttatgcgcttttgcctgattcaaagctttatgctggctggtttgtttgcatatatcggctcttcgtcgttcgtgttgcagaaggaatttggctttagtccaatgcaatttagcctggtgtttggccttaacggcatcggacttatcattgcttcatggatcttctcgcgcctggcgcgacggattaacgcgatgacattgttgcgaggtggcctgatagcggcaattttgtgtgcattgctcacggtcttatgcgcatggatacaattgcccattccggcactggtggcattatttttcaccatcgcattttgtagcggcatcggcactgttggcggggcagaggctatgagtgcagtagggacgcaggaatctggaacggcgtctgcgttgatggggatgagcatgtttgtcttcggcggtatagccgcgccattgtcgggaattggcggagaaacactgttaaaaatgagtctggcaattacggtgtgttatacgctggcattgctggttgctctcaccagaatcgacaatcaaaagtaatgaacacctcatcctgaggggggcctgtcaggatgaggtg

SEQ ID NO: 29 - DNA, 665 bp, Escherichia coli
tcattgatgtgcagatattagaattgtcgtaatgttatatacatggcgtattttattcttactggttctacacatgttaatcgcatctgattgatcagttcaccttaataagtttaataaatcgtactgcacatagtacagtacgatggtagctatataattgatttacatgaagaagggcttatcaccatcagtcccgggttgattgatgcctatattctcaccaatgtgtttctcaggtttattgatgatatctgtgattaatgctgcgacactcttacgtgatacgatcgtacctttgaatggttcattgcgtgaggtaagctcataatcaataatatcttcatcagtcagccaggcagggcgaagaattgtatattccagtccagaagcctcaattgcatccgcagccctgcggaatggttttaggggttcaccaataactgcattattccattcgccaaattttcctggaacttcattataaataccgagggaaagaacaaagatcagacgtttaacatcacaggctttcatcgcagcgatcactgaatttgcctgaatatctaaatcttcccccgtaaggttggcatacacaacatcctgtccctgcatggcctgcttcagtgctgcatgattcagtacatcccccataataatcttgc

SEQ ID NO: 30 - DNA, 98 bp, Escherichia coli
tttaatcgtaccggagcggatggcataaagcgatttaagttcatctccagccttaaacagcgtctggcctttctgaataggcttcttccgctcaatga

SEQ ID NO: 31 - DNA, 113 bp, Escherichia coli
taatactaacaaaaagtaagtaccaggtttcgcgtctggtttgtcgcagtatttaagcataaagcgattttttgatttttctgcctgaagaaatgagggcaagccatcaaatt

SEQ ID NO: 32 - DNA, 1749 bp, Escherichia coli
cgttaatcgacgagtaaatttaccgggcgagtagcccgttcgacgcttaaacatattgccgaacgattcagctgaggcatagcccagacgatgggcaattttggtcaacgaatatccatcatcaagaagcgtcactgcagaaataacgtgcatttgctgaacccagtggcgaaatgttaatcccgtctctttaacaaataagcgcatgagtgtacggctactgacgttaattttatccgctagattatccagtgttggcagatacccttggttgtttagcaaattctcacaaagctgctgtagccgctcatcatttggccaagggagttcaagtgacattttcacccccatttttatttcctgaagtatcagcgtctcgagggctgaaaaacgtaactgttgtttatctgtggtactttgcggcggtggaagttggttaattgcaattagtaattcccttaacaggggtgaaatacccgtcatgaagcaaacttttcccagcgtttcactttccgcttctgaaaccagtacggtttttaaaagtacgttgcctgtcgcaacaaacttatgcggcatttgtgggggcagccaaagcgcgctgctggcatgcactagccagacgctttctccagcccatatacgaacgactccttcagccgggtaaagcaactgggcatagagatgtttatgccagggaactgtgcctccattcagatgttccgaatccagtccgataatgtgatgccctggtgatgctttaggttgcagtgtgattgtcatttacagtaggtattttgtcagaaatcatcaaataagccatgttaaattttaaatatgacgtatgcaagtttccggatatatacggtgtaaagagtgatgataatttctaaaaaacagcttattggggtggtagcgatcggtattcttttggctggcgttgtcttttttatctggtgggtaagcaaaggaagatttatacagacgacggatgatgcttacattggtggtaatatcaccacggtggcaagtaaagtttctggttatatttctgctatagaggtgcgcgataatcagagtgtaaaaaaaggcgatattatcctgcgtctcgatgatcgggattatcgtgcaaatgtcgccagattagagggatttcgcagcagtttgcgatggcccccatcgtaacattaacgctggggggaattccaaaagaacggctgaagttagcctctggtgtatttaatttaacacgtaatcttgggggcgcaattggtattgccctgtgtggctctattctcaataatcgaactaattttcatttttcgagaatgggtgaaaaaatggtttctgttccccatatggtgaatgacttcatttccagaagtgctttgttttttaatcgcagtggaagtgaccagacatcggaaatactggcttcaaccaaattattgagtcaattgatgctgagggaggcgcaaactatggcattttcggatacctttctgctaatcagtggtctgttatttatcgcatttttgttggttcctgctatgaataaatcatcctgatcggagcctgtgctgaattaaactcgggctaaactgttcgatactgctaacaggctagtataaaatgccccgcctgcgcagatactcacaggtatgaagtagagtattgtttcaatctgtgaagggaacgatgcagtaagtatgaacaattaacccgtctgaatcacgacgtgtgaaggtgcat

SEQ ID NO: 33 - DNA, 1962 bp, Escherichia coli
tagtcgtagtgaaatctgatgggaaagccttgcttagcatgctggtgttgcgctacccgtacaggatgcggtaacacaggaagaaattagaacagaaactgtggcggacattgtgcattcgttgccaggcggagaaatagaacgctacaacaagtgcagaatataatttttcgcaagtgccagaatagcgatattatgcagtgttttttagttttctatcaggggatattttgtgaaacttttcggtgaataaaataattctctgtaataaatgatgggtatggttggtggttatatttgcgcatggaaatattacattggatatgaatgtatttcaaatgaaagaaccatgacacccgaatggagttagggattcattacgtatctaatctaaagaataagaaaaatacttaattcattgtgggtggtgatgatatcttgatatgtaaaaatggttctcttaataagatgtaactagcttattacttatccatagcacaagaaatggtcctgtatctgcgttgccatgaaataagataggcctaaatgtaataaagagttgcatgacaaaattactaaagttcacaataaaaaagaattaagttttttgttcaagtatttttttagtgtattgttttgaaatgttctacgctgctctaaccttcagtctgaagagggcttgaatcgtgatgtcagttcgattgacataatgttattaataatgtttacgtttgaatgtgaaatatgcttaactatgccttgattgttaatcacagggactgactatgagaaaaatactgatgtatttatgtattagcatatggattgttatatcatgcgtgcctatcatattaactagcgagtatttaacagaggcgagtataatggcattgatgtttggtcatgccaatgcactatgtattggggtttttatttctattatttatatagaatgctggaggtaaatagtgtgaacagcattagtttgatgattttatactgaactaaagggggaaagaggtaacgaaaaaagacctccaccaggtacgaatctgaggcgggcagatggaggtcgatatctacacgattaaattgataagtaaaagtcccatcagggattgatttgttcgagtctaatttaaagtaatttcaacgatttggcagaatttcttagagttaatgattttcaagttttcgattaccaggaaaaaggctgggtgctgataaaatagtcatctgcattccttaaattgtgtaagggtgaaaggataaagttcaatttaaaggcggtgcaatattagcaccatcttatatatgtaatgattgatttgcctctttattctactgttgagattattgtttccgaaaattgattattataagcgcgaaaagaaatgctacagcaaataagaggacgattgtcggcgctggggctctatcgagaaaatataataaccatacacctgatattgttattgatatcgttacggcgataagtaatgccttatgaaagcgatgcgtgatgaggacagcaatagaccctggagctattaatagtatatagacagaataatttcgactgcttttaatgtggcaaaaatggtaggcgataccatgcagagtaaaccgtaatgtaataatgatatctgtaatccgctgacttgtgcctgttgatagtcaagacaaaaattcctgaaaaaacgatacctataatggtatctttctttatgatgctattatctttcagatagccagttgtaattgcacaagacagtcctacaataaatgcaccaattcccagcggcatacctataatccaggctagaactatgccaggaaacattgcgtggttcattgcatctcctattagcgcccagccttttaataccaggaaaactgataataatgcacaggggaacgatattataatagcgattatcaatgcataattcataaatttaa

SEQ ID NO: 34 - DNA, 282 bp, Escherichia coli
ttttgctcttttaattataaggatgagttatgtttcggctctaatttatttattcgagtattgatttataccgttttttcattaaataaatatctatgtgacgcatttgaatttataatttatataatatacataatttgtatgtttcgcgggtttatttatttctctgtattataaatccagattgtcagagaatatgtttgattaggtaacaatctactggcaatattggacgtcctctatgttttaaataatcaattggtcgggtcagggtatccgacc

SEQ ID NO: 35 - DNA, 5225 bp, Escherichia coli
  misc_feature (377)..(377): Unsure
  misc_feature (1204)..(1204): Unsure
agccatcgtcaacaacgactggtgacagcacgatccttgatggcggcaccggaacccgcattacgggtgatgatgcgacggccaacaacagcggcaataccaccgttgatggtcagggttcgaccggaactgaaatcgcgggtaacaacgcggtggtgaaccaggacggcgagctggatgtgagcggcggcggtcacgggattgatatcaccggcgacagtgcaacggtggataacaaaggcggtatgaccgtcacsgatgcggattcbattggyattcagatcgacggcgacaaggcggtcgtgaacaacgacggtgacaatgccatcagcarcggcggcaccggcacgcaggttaacggcgacgaagccaccgtnaacmataacggtaaaccccccgttgatggtcagggctcgaccggaactgaaatcgcgggtaataacgcggtggtgaaccaggacggcgagctggatgtcagcggcggtggtcacggggttgatatcaccggcgacagcgcaacggtggataacaaaggcggtatgaccgttaccgatccggattccatcggtattcagatcgacggcgacaaggcggtcgtgaacaacgacggtgacagtgccatcagcaacggcggcaccggcacgcaggttaacggtgatgaagccaccgtgaacaataacggtaaaaccaccgttgatggtcagggctcgatcggtaccgaaatcgcgggtaataacgcggtggtgaatcaggacggtacactggatgtcagcggcggcggtcacgggattgatatcaccggcgacagcgcgacggtggacaacaaaggcggcatgactgtcaccgatccggattccatcggtattcagatcgacggcgacaaggcggttgtcaataacgacggtgacagtgccatcagtaacggcggcaccggcacgcagattaacggtgatgaagccaccgtaaacaataacggcagcaccaccgttgacggaaaagattccacaggcactgagattaacggtgacaaagccatcgtcaacaacgacggtgacagcacgatccttgatggcggcaccggaacccgcattacgggtgatgatgcgacggccaacaacagtggcaataccaccgtagacggtcagggttcgaccggaactgaaatcgcgggtaataacgcggtggtgaatcaggacggcgagcntggatgtgagctggcggcggtcactgggattgatatcaccggcgacagcgcgacggtggacaacaaaggcggcatgacttgtyaccgatccggattccatcggtattcagatcgacggcgacaaggcggtcgtgaacaacgacggtgacagtgccatcagcaacggcggcaccggcacgcaggttaacggcgacgaagccaccgtaaacaataacggtaaaaccaccgttgatggtcagggctcgaccggaactgaaatcgcgggtaataacgcggtggtgaaccaggacggcgagctggatgtcagcggcggtggtcacggggttgatatcaccggcgacagcgcaacggtggataacaaaggcggtatgaccgttaccgatccggattccatcggtattcagatcgacggcgacaaggcggtcgtgaacaacgacggtgacagtgccatcagcaacggcggcaccggcacgcaggttaacggtgatgaagccaccgtgaacaataacggtaaaaccaccgttgatggtcagggctcgatcggtaccgaaatcgcgggtaataacgcggtggtgaatcaggacggtacactggatgtcagcggcggcggtcacgggattgatatcaccggcgacagcgcgacggtggacaacaaaggcggcatgactgtcaccgatccggattccatcggtattcagatcgacggcgacaaggcggttgtcaataacgacggtgacagtgccatcagtaacggcggcaccggcacgcagattaacggtgatgaagccaccgtaaacaataacggcagcaccaccgttgacggaaaagattccacaggcactgagattaacggtgacaaagccatcgtcaacaacgacggtgacagcacgatccttgatggcggcaccggaacccgcattacgggtgatgatgcgacggccaacaacagtggcaataccaccgttgacggacagggttcgaccggaactgaaatcgcgggtaacaacgcggtggtgaaccaggacggcgagctggatgtgagcggcggcggtcacggcattgatatcactggtgatagcgccactgtaatcaacaaaggcaatataactgtcacggataaagattcggttggtgtactgattaatggtgatcgagcgacctttgccaatacgggtcatattgacgtcaataattcagctactgggtttagcatcgcaaccagtgagggagttatctcattaactggcagtatggatgtaggtgacatctcaacaggaatggtgctcagcggagatggcaacagcgtgacgctggcagtagaagatcttaatgttactgggcagaaagcgatgggtgtcgacatttctggtgatagtaacgacattgatatcgctggcaatatcttggttgataaagatcaaactgcagataatgcggcagactatttcttcgagtcatctgtcggggtgaatgtcacgggtaacaataatacagtatctctaaatggcgaattaacagttgtctctgacagcgaattaacctcaagatctcatggcaagcgtgatgggagtcaagaaaatatctccgggctgattgtgtctggtgataataatacaataagcctaaatggcggtatacagtttatcggtgagcaaaaaatactggcggatggttcagatattgcatctctgcgtaaaggatttagtgatacctccataatcagcgttgatgggaactcatcagtatatttgaatgggacttcgacaataggtggcgaccttcctttaggctatacaagcattattcagttaaaaaataaagctatcctggaaattggtcgtgatgctttgttgggtgtaaaggatattaaatcgtttaataactattacgagccagtaccgaagattataaaggctactacaggttctaaggtcatcaataatggcaatatagatatccaaaatatcggttttatttcagtgtcaggtgaagatacgtcgggcactaataatggcaacattacgctatcacagtacgattacggcaacatgatgtcaggtactaatgctctgttaagtaccgatggaggcagtgttgttaacaacggcaccatcatcgggaaggtcatggagcaaagtagcgttattaatcgatttgagacgaccgacgttacttatgatgagttgtttaataatagcgttacgggcataaccggaatgctttctaaaaccggtgctatgggcattaataatgtaaacggcattattgatatgtatggacgcggtagcgtgggtatgttggcggttactcaagcgattatagaaaatgctggcaccatcaaactggactctctatgggttgatgctaacgataccactgcgttacccgataatatcgctatcagtaatgcccgttattatggtgcagggatggcggtaggttcagatagctatggtagcccggatgcaaatgtcacagctattaaccaattaggtggtgtgattagtgtctataatgctggggtcggtatggccgcttacggcggtagtaatatggttattaaccaaggtacgattaacctggagaaaaatgaaaactatagcagtagtctgagtgcaaatacgctagttggtatggcggtttatcaacacggcactgctattaacgataaaactggcgtgattaatattaatgtcgataccggccaggcgttttataacgacggtacagggacaatcctgaattatggtgagataaaccttctcggttctccaatggacagtgcagatccccatatgggggctaccccagataatctggatctgctgtcagcactaacaggcagcggcgaaacggatatgcgaactgcttcaagtggtgggtttgtgacgaccaaagcgctggcaaactacggcaatgaaacgctaaatagtaatgtgaccgccaaagcgtggctttataaccaggataaggccaatctgacaattaacggagagctatccgttgggcaagggctggaaaatagcggattactggattctgacaccattagtgcagcagcgaatgtctataaccgtgcatcgggtagcattattaccgacctgttaatgttaacgagtggtaactcgttttttaacgagggtaatttcagcggatctatagttggcaacagctataggcaaaatgtggttaataccggaagtatgacagtcacggctgatggtacatcgctcatcggcggcagctttgtgctttataacgaagcgggggcaatactcagcaacagcaacagcgccgtttcgggtggagaaaatgccattgttaacataacccgcaccagcgattcactcgcgcaagttaaccgcggcactattaccgcgaccaacggctacagtgcgattaaaacggcaagtacgggttctaacagcaacggaaaatggatctggaataccgatacgggtgtaattagcggcgtgagtcctaatgcactgttaattgatcttggtcgcggctataactttgccaacgcaggcactattaatgtgcagggtgatggtgcagtcgctatcagcgggggaaccaccagctatacggttcaactggtgaacagtgggaccatcaatgtcggtacggcgcagggtaaagcggacggcactaacggtactggtttaattggtatcaaggggaatggccgtgagacgacaattaataacgcacaaagcggtgtaattaacgtttacgcagataactcctgggctttcggaggacagactaaaacgatcatcaataatggtgaaatcaacctgctgtgtgatatgggatgtgatatttatgcaccgggcaccaccggtacactgaacgatcataacagtactactgatattattgttcctgccgcaacgagcacacctacgcaggggtcagtacccacagtacctgcggactccagtgcacagcaaaaactgactaactacactattggtaccaatagcgatggcacctctggtatgttgaaagccaa

SEQ ID NO: 36 - DNA, 96 bp, Escherichia coli
atcagggaaaaggcgatggattcattgattcgtacagtgatagatggtatctcactgatatccagacggtaatcaaacagatgtgtagggcattca

SEQ ID NO: 37 - DNA, 108 bp, Escherichia coli
tttcgaaaatattaaacaagttattgatgacatggcgaccgatgccaccatgtttgacgttaacaaaaagtagttccagacgcgccatcgttagatggcgctttttat

SEQ ID NO: 38 - DNA, 221 bp, Escherichia coli
atgaatcactggcgtagttaactggatatccatttgtttgctatgaatagtaattaaagttggtacaactatttatatgattgatgtaatttcgttttttatatgaaatatcaatttaatataatccgaaaataaaacatcttttcgcatgtagagaaacatgtcgatatgatagtgcagtgcagatcatgtcatcagggtagggcggtagcgtatttaat

SEQ ID NO: 39 - DNA, 11366 bp, Escherichia coli
  misc_feature (743)..(743): Unsure
  misc_feature (5460)..(5460): Unsure
tacacgccaacaatttgtattacttaaatagaccagtgaaggtacgcatcagaatatccggtgaagtgattaatatttcgttgaatatttctccggatttttgaaacctgctgctgtagaaattctgaacaggaggaattatgcctttagcagccaaacttaccgacaaaggcacccagcacgacggttattacgagaccgtcatcaccgccgggtcatccaccgtttttattgatggcctccccgcagctcgtcaggaggatccgctgacgccgcatgataaaccgaagcatccccctcatccccgtaaaatcgccagaggctcgtcaaccgtctttattgacggcctgcccgccgccagaaccggtgatgctattgactgcggcggcgtggttattggtggcggtacggtaaatataggctgatatgtctgagaggtatttatgtccttaaaaggtcttcgctttacgctggaggttgacggccaggagccggacacctttgcagtgttgagcttccggttaatccagaaccagtcttatccgtttgtgatgagtgtggatgtcgccagcgattcttttatgcagacggcggagatgctgctggagaagaaggcaacgctgaccatctggcagggcgtcatcccgcagcgttatgtcacaggcgtggtggcgggctttggcatgcaggagaacaatggctggcagatgcgttaccacctgtgtattgagccgccgttatgncggtgcgggctgcggcagaacttccgcatcttccagcagcaggatatccggacgatatcggccacgttactgaacgagaacggcgtcacggagtggacgccgctgttttatgaggaccatccggcgcgggagttctgtgtccagtacggggaaagcgacctggcgtttctggcgcggctgtgggcggaggagggtattttcttctttgagcggtttgcggcggacagtccggagcagaagctgacgctgtgcgacgatgtggcggggctgtcacaggcgggagagtttccgtttaacccggacgcatcgacaggagcggagacggagtgtgtcagtatgttccgttatgaggcgcatgtccgcccgtcgtcggtgcagagccaggattacacgtttaaggtgccggactggccggggatgtatgagcagcagggtgagagcctgaacggacagcttgaacagtatgaaatatttgattatccgggaaggttcaaggatgagcagcacggcaaggatttcacgctgtaccagatggagagcctgcgcagtgatgcggaaaaggccacagggcagagtaattcgccgaagctgtggccgggaacgcggtttacgctgacggggcatccgcagaagatgctgaaccgtgaatggcaggtggtacagagcattctgtcaggagaccagccgcaggcgcttcatggcagccaggggagaggaaccacgctgggaaatcagttagaggtgataccggcggaccggacctggcgtccacgggtgcagagcaaaccgaaggtggacgggccgcagagtgcgatagtgacggggccagcgggagaggagattttctgcgacgaacatggtcgggtacgggtgaagtttcactgggaccgttatcacgggatgacggaggagagttcgtgctgggtgagggtgtcacaggcgtgggcggggccggggttcggtaacctggcgataccgcgtgtgggtcaggaagtgatagtggacttcctgaacggggacccggaccagccgataatcatggggcggacgtaccatgaggacaaccgttcgccggggagtctgccggggacgaagacgcagatgacgatacggtcgaagacctataaaggaagcgggtttaacgagctgcgctttgaggacgccacggacaaggaagaaatctacctgcacgcccagaaaaatatgcaggtcgtggtgctgaacagcaaggataagcgggtcaactatgaccgggcggtcagcatcgggcatgatgaattcctggtggtggcaaatgaccggaaagtgacggttgaaggtaaacaggaccataaaaccaccaaagaccacgtcagcctgacagagggtaatcagggactggaggtgaaaggcgatctggcacagaaaataagcggcgcgctgggtatcagcgtacagggcgatattgttttacagagcgacagcaaaatcagtctgcgggtgggaggttcatttgtggtgatccattccggcggcgtggatattaagggcgcgaaaatcaatcttaacggcggaggcagtccgggagacgtgatcctgccgatgcgcccggtgatcctgaaagccgcagccgggagtggttcgatgtttgtggcgcattgcccgaaggaggataagtgatggaaacggcacccgtaaagtacgctattgtggatggtgctgtggaggaaggattgctggattttctgaacgaagtgaatcccccacactgctgtctgtatgcagaacccatacagccggatctggtcgcgcgtggccccctatctcgtggaagttgttccggaggttgaagcatggctgagagataaggcgtcgccatggggaatatatctgacttctgagtcatccatgcgtgagctacagcaacacttcagacgttatctgtgggttaggatccccgaacaggagaaacctgttctcatgcgattttatgatccccggaatatatgggtattagcggaagttcttaccccccgccagcttcttttttttatcaaccccgtcagacagctaagtacccgctatggtgaagaatatcgtgaggataatttttcttccgtccgtcccgcagaaactatgaatataagggcagaacggccatcacaactgatgctgagttacagacaatatagccaactggaacgaaaggcacgggataattatcttgatacattatctgtatttatcgaagaaaatgcagaaaaagaagggtgggatgattcatcaaaagctgaatcatcccgaattctggcagaagattatttctctttttgccagtcattaaatatagcagatgatcgttccgtcagaacaatgacgcttatcttactgaaaaaaaacataatcgatctccgatatattccggatgactggtatgaactactcagcaatcagtcatatccgggacatattcgggtacatgaacttgcacaacaggaactgggatttatcccgcaataaaaagacaaacggatagattatatgacatctccatcttcgacagccggaaagccttgtgtggaatgcggcatacctgatccatgtatttttgatgttattagtgattttccagaggccggcgagaaacatttctggtcaaaagaaggaatggcgcgttttaagctactggacgatggttttggatgtgatggtataattaaccattacctaccagtgcgacaacagtgggacacatgaggcatggttagaggaagaatcagaaaacagtcgtaagatactgcaaccttttggaaaacccaataatgttacattatattatgaaggtttcaagggtggaatgaatatcattgatgcgtttcattctccgtgggagtatctgagttcaattaccatgccacatgatgttctttatgaaccagcacattacacagtcagaattgatagctgttacgagcacaactcctatgtcgagattaaggtttatccttcattagaaattcggtttaccacagggcttagttatgagatttcgtcatcacaacagacacgagcggtaaaagatcgacgtgatgaacggagaaaagctcgggaggcgatggaagatacaaaacctaaagataaaaataaactacgaagcggatggacaaatacaaccgctgagtttgagttgtttcacaagacatctcttaccgttgaactgggattaaaagtcgctaatgttgaatatacacacaagtatgtagaggaaataaaaaaactcagacaaataaaacaactggagcagatgagtagaatagatgcgctgattaaaagcattaacaaatactttgcgccagatcctgacaacaaagatggtacgcgtaaatatgcgttattcagtgcaaaaatagaacctgtcacactggggatttcttatgcttatcaatacactgatattaaagatggtccgtgccatttttatggtctatatggtgctccatttttcaaagcatcattccgatttgatatcatctcatttatatgtgcatactgcaaaatggaagatctggtaaaccgatgccgtgaatatctccgcaagcatggaaccagtgttgaatgctatatcgaaatttcaccggaagttaatctcgatcttggggctgtatattctcaaaaagataaagcatgggaatttaacactaaagaaagcaatattaaacttggtttgaaaggtgaggttagtgcaacatttgagacgaatgtttttgtcgtgaaattgaaatctgaggttggtgcttctatagaagcaaaagctgggtttggatttgataaacgagatgatggaatggatcttgttctatttcatgatggagtgacgggcgcgtttaaagttaaggttgacatatctcgcggtgataaagatagaaaagagaatagtgagaaacccgaaaaagaaaatgaacttaagtggcaactatgtaaacctttggaagtagatgactcaccattacggattaatttgtatggtaaggaaaatactgtggaaaaaaaagtaacgccagtgacgcagtggcagataggcactgattattgaacggcgaagaatgaatcaaattaaagataataaggtaattatgaaaataaaaaatttaatatcagtcattttactatcaggaggtattatggggactggattgtactcgagcgataaccatcaaaaaatccgcagcaggtttaatatacaggaatcatattgtgccattaagactaatggtgtccttggattcagcaaccgaaaggatgtattgcgagaaaatggtgattcaaccggaaccaccagttccagcactaatgccatgatgctgatggaaaatggtgaaaatgaaatcagtctggagattggggcgttaaggtggttttctgataaacctgccagtaccgaagaacgagggcatttctcccaaaaagcagggtgcagtctggatttggttcgttttgttaagcaggaagaaaccatactttcttcgataaaggtgaccatcaaccagcagggaatacctgaagcgcagccagacagcatgcatcctgttatccgaaaagagattctggctgagcaggcagaacccggatttattgatccagactattttaatgaaacttatttcccgaaagggatgaaggtgtatcaatttacacaaaaggtctcggtggcggggcttcctgaatgggcctggacgcnagctacgccctttaccggaagcgatgaacagttacagtwagctaaaagcagcctatatcgaaatggctgcaattattagcagcggggacagggcacgtctgaaagcttctcacaaagaggcactgaaagcctggtcagtcacaaccggtgacagtgaggatgaaatattgctctcgctctatccaaaagaagaaatagaaggcaggaaagccagaatgcagcccatcagatggggcgattacgctatccgggttatgaataatggacgtatggtgcagctatataataaatcgaaaccaacatattctccgctgacttatcgtttcatagatgaagatggtgatgaagttatggggtattacgctccggtattttcgctgattgatggtcagtttatccctgtcacttgattaacctgttgggctacaaatcaggatgtccggtaaggtgattattgctgagttaagcaccttaccatttttttaattttttgtcgctgatattccagacaggaaaacaatatgcctttagctgccagattaaacgacaaaggtacccaggcatgatggctaccgtgagacagtcatcattgcggcttcatcgacggtatttattgatggattacctgccgcccgccagggagatccgctgacgccgcatgataaaccgaagcatccccctcatccccgaaaaatcgccagaggctcgtcaaccgtctttattgacggcctgcccgccgccagaaccggtgatgctattgactgcggcggcgtggttattggtggcggtacggtaaatataggctgatatgtctgagaggtatttatgtccttaaaaggtcttcgctttacgctggaggttgacggccaggagccggacacctttgcagtggtgaatttcaggttaatccagaaccagtcttatccgtttgtgatgagtgtggatgtcgccagcgattcttttatgcagacggcggagatgctgctggagaagaacgcaacgctgactatctggcagggcgtcattccgcagcgttatgtcaccggcgtggtggcggggtttggtatgcaggagaacaacggctggcagatgcgttatcacctgcgtattgagccgccgttatggcggtgcgggctgcggcggaacttccgtatcttccagcagcaggatatccggacgatatcggccatgctgctgaacgagaacggcgtcacagagtggacgccgctgttttatgaggaccatccggcgcgggagttctgtgtccagtacggggaaagcgacctggcgtttctggcgcggctgtgggcggaggaggggattttcttctttgagcggtttgcggcggacagtccggagcagaagctgacgctgtgcgacgatgtggcggggctgtcacaggcgggggagcttccgtttaacccggacacatcggcaggagcggagacggagtgtgtcagtatgttccgttatgaggcgcatgtccgcccgtcatcggtgcagagccaggattacacgtttaaggtgccggactggccggggatgtatgagcagcagggtgagagcctgaacggacagcttgaacagtatgaaatatttgattatccgggaaggtacaaggatgaacagcacggcaaggatttcacgctgtaccggatggagagcctgcgcagtgatgcggaaaaggccacagggcagagtaattcgccgaagctgtggccgggaacgcggtttacgctgacggggcatccgcagaagatgctgaaccgtgaatggcaggtggtacagagcattctgtcaggagaccagccgcaggcgcttcacggcagccaggggagaggaaccacgctgggcaatcagttagaggtgataccggcggaccggacgtggcgtccacggcagcaaagcaaaccgaaggtggacgggccacagagcgccattgtcaccggtcccgcaggagaggaaatcttctgcgacgaacatggtcgggtacgggtgaagtttcactgggaccgttatcacgggatgacggaggagagttcgtgctgggtgcgtgtgtcgcaggcgtgggcggggccgggatttggtaatctggcgataccgcgggtgggccaggaggtgattgttgattttctgaacggggacccggaccagccgctggtcatgggccggacgtaccatgaggacaaccgttcgccgggggacctgccgggaacgaagacgcagatgacgatacggtcgaagacctataaaggaagcggttttaatgagttgcgctttgaggatgcgacggataaggaacaggtctatatccacgcgcagaagaacatggacacggaggtacttaacgaccggacgacggatgtgaaacatgaccatacggagaccatcgggaacgaccagaagataacggtggtgaaggggcagacggttcaggtcgggaccagaaaagaagggggccacgaccagagtatcacggtggcgaatgaccggcgcataacggtacgcaacgaccagacgctgaaggtgacgaacgaccggacggtgagcgtgagtcatgatgacggcctgtacgtcagaaatgaccgtagggtgacggtgaaagggaagcaggagcataagacgacggggaaccatgtcagcctggtggagggaaagcacagcctggtggtgaagggggacctggcgaggaaggtgagtggcgcgctggggataaaggtggacggggaaatcgtgctggagagcagcagccggataagcctgaaagtgggtggttcgtttgtggtcatccattcagggggcgtggacatcgtcgggccgaaaatcaatctcaatagcggcggtagtccgggaacgccggtgccgacgctgcaaccgacggtgctgaagacaccggggggtgagaagagtggtgatggcagtgactccggagaagaaaatgaagaccctggagggagcggcttggccggaagtggtggtggtgatcgaggtgacgatgaggatgaacctgaaaaatatactctccagttccattttacagacgatgacgggataccgtattcagaaatacgctacattgccttctttgaggacggtgcgcagattcgcggtgaaacggacaaggacgggtatacagaagttttctctagaaccaatgatgcaaatgtagaaattaaactgttaactaatgattattatatatttgaggtgaattgtaatgagcaccagtaataacatgggtagaaccacacaggctcaaccaaagcccggtgtaaatgtctgcatagtaaaaaaagaaataactaataaattcaatgagattattaccaatgctttggctgaacaactagttgttttaaataaaagaaaaaaagacttatatagatgggaggagacagaaaaaaaagaatttcttgatatttttgggagaaatgagattgaggctaataaatggctgctgagaggcgttgaggcaatgatattagtcaatcagagagtgaaaagcaattgttttaaatatcaaggtgatgaatgtatttttgccaaagtgcagggagggattagtagtgagaatcctgttattgtaggccctaaattttttcatgccgcggttaaaggatacgattcccaggtatccactttatgtcatgagttttcacatttaagcgaagttctgtatactgacgatttaagccctccgggtaaaaatgcggaaacaacatctgctgaagaatacagagagcatgcggaaaatcttgtaaaagctaaaagtcgagatgtaatgataaatggatataacattgaacgttacttcgaataagattattcattgcctttatatcacaacctttacgctaatgtttttcagcacaaatttgaaaggtgaaaattatttaatacccaaaaaaaatgcttatggatcgttagtgttcgcagaaaagaagcatgaacatccgggtgtttatgatttatttcaatcaaacaaattcattacaaaagatacgacatactttgatctaactcctgattatgcaatgagtaaaaatgaaaatattatattgcaacaagaaaatcaagttttcttgactctttcagttgaaagtgtcaaaaaaatattatagcgatagttaatgtttataatgctcatgatggctatttgtatatttataaaaagaatataccttataatggtaaggatttatgtgataaacgttttttaattacatcatatgatgtaattctcgattatctgggaggatggtgtaattatggactggatatgtcatcttctgcgtggcttgagataccacctaaaagcaattatacatatcaagttaatttaaatgactactacgtttttttaccaggcaagcatcgctataacgttggtacttttgagcatcttattgtaagaagtaattggttcaggaatgaaaatataaacacggcaatgtttaatattttaaaccaaagtcatcctaagaaaaaaattgatgatttattatataatcttgatctctatggggcaagactaggtgtctttttgagaagcaatgaagtttcgttattaatcgatggggatgaacttgactctctttatagcaagtaagcaaaaatacataatggtaagccatcgattgatacctggcggtagtttaggcgttaattattgggcggataaaggatgtagtttgtcacatgccagagaagttacacggcgaataaacccagcagcagatggcttcgatttagtacgttggccagcatttgagcattcttgatatgtattgaatgatgaaataacccccccacttaattacataaggattgtttaaaacaatggggtttagaaaaacaataatcacttcggtaggtttgatatttatttcattctcttttgtggcaaagtgctctcaactcaaaaatttgaataattactcagtgatgctttgtggaaaagtgtcaaataatatcctggatgatattggtggttataaagaaagaaatatattaatgctgcgagctataaaaaaaatcataataatgacaatcgtaaatattatatttttctattcctttcaatcgactgcggatgaaatggttttaataaaaaaatacgggtttgggcttgagagagatatcaaaggaaggccattaatttatcctatcgaaaattatgatgagtgtaagaaaaaatgcaatcatatgaattatatagcggatgtcaatgctcaattagctatgagtaaaaaaaataacaggatttttgctaacataacctttactaacaatagctctaccacgtatttttttctaaatattatctacctatgaaagtaaaagatggaaaaggagatgaatatgatgcgatatgcaaaaaaccattcagaatcaactctgggaatatcacgttggactacttaggtggttcatgtccttttgaaattaatacgaatcctgaacggtggaatactattaaaccaggtcgtagttttttgttgagtataaccttaaatgatatgtatgcctttataccaggagataattattattttataaaatcatctggctataaatttgttaatgacaagtggtttacactcaaatcaatcaataatatttttctttattttttaaatttaaaaattaattgtgctgatgatttttttgatattaataattttactacatgtaataatttgttattggatgaaaaaaacacttttttattaatcagttatgggcaattgaggatgaaaaaaattctatttacgtcacccctgatgaaatttctataagtatagacggcgataacttaaagttgccatattaggaatatgggaaagaacacggtgcgccgcttttttgcactaaataatttacattttatgttcaataattgatac

SEQ ID NO: 40 - DNA, 596 bp, Escherichia coli
ccgctgaaaattcaggttaaccgcgttccatgcaaacaattttcaaatattcatcaataaataaggagttccatgtttatacgaccagtcaaaccttcagatgttgaaccattaatggatatgctgcttgacagggatcaatttgatcaagatggccttcatcatgtacaaaaaacactaacacattatttctcaggtcaatctgccgatttatggtttagtgcagaacacttgggactggcagggattgcctactgtgcttctgaaatgatgacaaatgatgtctgaaatttattaatgctctggatcagtccttcccatcagcgccagggagtgagacatctgctgattaacgaaatagaaaagagctcacaattaaacaggcaagactactattagtagagaccgccagccatatcgattttagtgccgcccgcgcattttatacaaaacagggctttatcaatgaggcgataatacgcaattactatgatgttggtgaggataaattaatcttcactaaaaatatgcaatcgtgagataaaatatgctttaactcatatggaaacattgcttaaacaacttggttgctgcat

SEQ ID NO: 41 - DNA, 421 bp, Escherichia coli
atagtcctcgtaatccagtatgtatgcatcgccattgacgaattcaaatgtgattcgccagttacccgagacagatatcgcccaaattccatcgcgatcgccgcttaacggatgtagtcggtaaccgggcatatcgatatcagcaagacagcatgctgcatcaatcacagcgagtcggtggcgtaatcgtttgacttgcgtcggtataacgccggaggttttgccgagaagaaacaagtcacgcaatcccttgtgtctgaaattcattatcatctcttcatccttgttccctcgaaaggaacactatcactattgttccgtgcagcgcaacaaatttcgctacgttttcgcgaattgtgaggggaaagatgggggaggaaaagaagaagagtgaaattgcggaaagcgtctcgcaaaacag

SEQ ID NO: 42 - DNA, 65 bp, Escherichia coli
cagccaatcacatcaggctgagaagggattgttgtgacatggctatgcgttgtcgttgtccaact

SEQ ID NO: 43 - DNA, 3281 bp, Escherichia coli
cgtctggtagaaggatttgctgtagacggatttaaccgattgtccgctgtgacgggtgtcatctgcaagtgtcgtattggcctgcgtaatatcgaaagaaaaggcaccaaaaagtcctaaatctttaccaataccaaggttgaaggcctgataatcttctgcaatttgcattccgccataaggtgtccagtttcctttcagaccatgcatcaagcttgcttgtacgaacttgggggtgctttgcaggttatttccactacgatattcccccatggcaagtgcataacgcgtatatccagcacgttggagaaccggaacagacgaataaggaacatataatgtctgaatactgccgtctgcctcttttatggttacttgcagatcaccaccattggccgcagagttgatatcatcaatagtaaaagggccgggtgggacagtagtctgataaacatcgtatccattctgttttacactcacttgtgcggtgccacgagcaataccatgaatcaccggagcgaaaccatgttggctatcgggcaacatcgcttctgttgaatttattttaaggccacgaaagttcacactgtcaaaaatatcgccatcggtataactatcacccactgttaaccgtgagcgtaacggaataatgtcacgttcagccgacgtattgatatgctgccatttattgctgtcagatgaattgctactcccactgttataactccacgttgagttatcgcgcagtcgccaactaccaatgttgatgccactctgtaaattcaaatatgcatagttggattttcctgcattatggttactacggttattaatagaattaccattaaaactatagtttagtagcccggcatttattccttcttcccacagatcaggagaaacatagccgcgagccattctgccgacatatatttgcggaacggagagtgacagatgttgctgaccaacatcaaactcagatgatgcgtcagccaaacgatcctgaagtggtgtgcatgcgctgttgtccggcacatgtttatctgccgaatgttccttgttgtctaataatgctgatttttttatgccaagactgacaagaaggtctgtactcaggcatgggatgagatctgcgttattatcatctgcaataaaagtaatatcccgactagccataaattcgtcgttcaaataaatgtcgacccgatatgtaccaggtggggcctcgcgtcccttagtaaaggcagataaatcgacagattcagcaaggtcattgcttaaaaaccgtggattaaaataatactctgcgtcaacgggaaaaaccgcagttgctaagccaagggcaaaggtaagccgtgcaaagcgaggcagtattaacacctgatgcatacgatatgccttaaatgcggcacgaaaggctgtcatttttaatcccgattgagtttattattaattaggtcactggcttactgcatggttgccttaatacgcggagttaatgcaccgtaatcattgattgtctgaaaactgatatccccggttacagcatgcgggatatccaccgatacttcaccttttggcggcaccatggtgtttgggagattgctatttcctgctttcatatttgttacggtaatgaagtagggcgttggattaataagagtgagtttgctaccgctgcgacgaaaccgaagcattgcaggcgcttcttcaggtgccattgccagatgcgtggggcgataaaacatttttatgcggctaataattgccagctgtaatgtattctcattcttctggtctttttccatagcagggatagctttaacattaacccagaacaggctttcacggtcgcctggtaactgatgattagtggcgttgattatccgaagcgtattctcttttttaccttgcatggaaaaaagcggtggggtaatgacaaactgggtatctttctggtcacccgcattttctatccatgactgaatgagatagacactggcaggatcattattcgtgacaggcaataaaacctgtttctggtttgccggataaattacccgcgtcgcaccaagtgcgacagctgcgttggcaatggtgctatggcaagcaaagagcaataaaagtaacactgtcgccataaaggaaacagagtagggggtacgcgtagtttgcatctgatgcattctccatgtgttaagaggataagcggggaaaccgttacatcagacaatcggtaaatattgctaatgcattggcgagtcgccggttttccagacttaatgcgtttgtaataaatgttggttctcttttgataggaaaaccttgctaccaagtaaatattttaaataacagcaagtttaactactgttgtttattgatcgtttagatattatgtgatttttcataccgctccaaaatacaaaccatttttcattaataatgagatgaacattggtgaatttctcgggtgtgcgtagccatgccacacacaccctgtttcaatttcagatgacgcatagtcaccttaagagtgaattatagatattgaactttgaaggtcgcatcagcgtttgcagtaccagctactgactgcccgagagcaatataacgagcctggaacggcagtatattcgtgccatcaatcaagtcagttttagcgctaaaagtagcaccatcaagtactaatacctcccctgtactgtccaaaatttggataccgacattttgggcagagcctgccgctgaactctgcagcgctaatgtatcgtcattactggtgacagtagtacccaggaatgcaacagctgcattactggaaacattggtatcacaatcattcagcttgatattgaagccaacggcggagctgaggtcacccgctttagccaggcgagaagaacgaacctgacccagctcaacagtttggttcattgattctgaatcaatcgcacaagcggcatttaccacttcacctttaaaatgaattacaccgccattaacagtggtcgttactgattcatcaccctcggctgcgcttaccgcagcagacgacatcgccaacacagaaacgacaataataccgacatgtttgagtttcataattctccaaaatttatatttaagtagctgaataaagagagttaacaattaagttattctgttattgcttataaaacaagaatcattcttgattggatgttgccctgagaatatagtttccatggttattacatttcacgaagaatgataatatctttaaattacaaggacacctattc

SEQ ID NO: 44 - DNA, 2489 bp, Escherichia coli
ctctctttgaatcataaactgaaggatgatgcagcacagttcctcgtggactatcctggctactacatgaccaaacgcggatatcatcctcgagcagtcaactctggccatctttttactcagctatgaggacctgatcgtcgactttgctatctgcatgatgaatctcctcagcagcagatgcagtatttaccgaaatgaattccatgaataatgcagtaattagtagtgctttcatatctgatacctgttttaaacgatatatttgaaagttgacgaatatcggaaatagcttcctccttcttgatctgtaaatatacagttctaagctgtcataagactgactgtcatatgacaacgttgttagatttttgaatttttcgaatacagattcaggtcgttaataacgcactcaggttcttcagtaaggggcatattgtctatatcgaaaaccccatcatttttttgtggattatcattccgcagctctgcaaacagaggagtgagatcctgctgtgcttctcctcgctctgcgaccagttcgaacgttttattttttgccgcatcgttgctcagagctgttacaagaacctgggcgatttgctcccgggagataacaccatcttccggcgttcccgcatggcgtctgtccccctgaagcatgacgattctgtgctcatcatcattgttgtaatcaaaccagccgggtctgacgatagtgtagatatgcccactggctctgaccaggcgttcagagcgtctcttccagtcatgaacttcagtacgttgattccagctactgagccgctcagttacgccaatcgttgtcatcagggcgatgcgaacaggtgtatccatgaatattcgcaaaatgttacgtacaccgccgtaatctattgctctggcgccaatacgtccctgaccatcagagccgagtgtaaaaatgatggcatcaatatctttcggtaaatcggtaagtgtttcaggtattgaaacatcgccatagaaaatatctgttccacgagggagtaacttgattttccgccgattcctgaccagagtcacgggctgatggcccattgcaatagcagtattcacaacatgaataccaatacttcctgttgcgccagcaacgagtattctcatgataaaccttctgataattcagccttatttttgatacagccagaatatcaattatcattattgccagtaacgaggctaaaatgattgtgtctatgaacacccttcatgaatgcgctttgaagggaatgcttctacaaggaaatcatcaatgcttaaagaaaacttcaacgaactgcaaatctttcttgtggtggcaagagagcgaagttttaccaaagcagcgagcaaactcggcgtctctcagtctgcacttagccatgcaatgaaggcactggaggaaaggttaaatatccgtctcttaacccgaactacccgtagcgtggcccccacggaagcaggggagagaattattgcctgtcttgagccacgtatagatgagcttgagcgcgagctggaatcacttatccaactgaatggcgcgccatccgggaatattcgtttatcagccggggaacatgctgcacgcagtctggtctggccgaagttaaaatcgttcctcagagaatatcccgaaatcaatgtcgaactggtggtggataacggttttgtcgatattgttgacggtcgttttgatgccgggatccggctgggtgaaagtgtggataaggatatgattgcagtgcgaattgggccggatatgcggatggccatggtgggatcgccggcgtattttgctgcaaaccctgcgcctgaaacgcctcacgaactacaaaatcatcgctgcatcaataacgtaacgtggataaacctgcgaatcgtattgaagatatccacggtatggctgatttcatcagccagtatcctggtgttgatagcacccgtattggtttgttggggatttgcgggggaggagggtattcacttgctaccgccgagacggacaaacgattcaaatcgattgcaaccattagcatgtttaattcaggacttgtacggcgcaatggtatgcaggattcacagttggatactattcaacaacgtcttaagcaggcttcagatgcacgagctcaggaagtcgccggtagcgaagtgctttactccggtgatgccaacctgactgatgaacagatcgctaratyaccttttgcgttatatcgccagggctacgagtactactggaaaacccacgcacacccaaacatattcagaagcgtgagggatatagtgccatcaaagcgctggctgctgtaaacaacgcaattatccaactcatggtctatggtgtgccatcactgaacagaggttgaatttttctaccgaaacgggagggaagtcagaaatcacaacgtattgatttatctgtgtgtggatgtgaatggtgaagtaaagsaccttcacaggca

SEQ ID NO: 45 - DNA, 498 bp, Escherichia coli
tcgccccgacaatagcgcataataatgcggcaagcagacagtaattaaatagccgtaaggcacttactggctcatacttattttttcccagacgcttatcccgcgcgaccagtaaggcgacggtaacaataaacatcatattggagaaattgatagccagtgaaaccagcccccattcggtggttatggcatcataaaccagcatcgccacataactgatcgcatagtaatgcagtcgattaagccagacatagcgggcaaacacccccgccattacgccattcagcggccagaaaagagaaagttcgtgaaccagccgtaactctgcaccaataaaatagaacagcgtggttagcacaaaaatagcgatgctattacgtagcagatgaccttcctggaacaaacggaaagttgaaatgggctgtacatgcattaattatctgtccatacaattgcgggtggcaattatctcaacgcaataagtaaattcttagaaag

SEQ ID NO: 46 - DNA, 6277 bp, Escherichia coli
  misc_feature (2284)..(2284): Unsure
attgtcaggctctgatcacagagcctgacatttccgtaatatcttcctgaagtctcatatattttcgccattgttggcgatgagatcccgataccagtaaaacgatgctttacgtatccgttccagcgttcccttcccttcgttgtctttatcgacataaatcattccgtagcgttttttcatttctcctgttccggcagaaaccaggtcaatgcaaccccacggggtgtagccaattaagtcaacaccatcttcaactacggcttttttcatttcccgaatatgggaggaaaagtaatcaatgcgatagtgatcgttcaccgtgccgtcagcttgtctctggtcaaccgcaccaaatccattttcgacaataaacagcggcaactggaaatgatcccagaaccagttgagtgaataacgtagccctgccggatcaatttgccatccccattcggatgtatcgatataagggttgctgaccaaatctcgtggttcaacataatccagttgcggattatctggcgaaaattgcgtcgtaaaagacatgtagtagctaaagccgataaagtcgacacaacctctggcaagaatcgcgttatcatctggtgtgatatcgaggttgaatcctttccttgcaaagtaattcagcatatgttgcggataatatccacgagcatgaacatcagtaaaccagtaacgacgatgcatcgctttcgtggccatcatcatatcgttgggtgcacacgtcagaggatagatggggcacatagcaatcatacagccgatattaaattcaggattgatcagttttccagtctgtaccgccagggcactggcaactaactcataatgtaccgcctggtacattatttgttcgcgctcattgagatcttcctctggcgaatacaagataccggaattagtaaatggacacaggctttcgctgaaattcacctgattattgatttcgttaaacgtcatccagtactttactttttctttatagcgcgtgaagaccgttgatgcgaagtggataaaaaagtcgatcagtttacggtttcgccagccaccatattttgtcaccagatgataaggcatctcaaaatgcgaaagcgtcaccacaggttccattccctgcttcaggcattcatcgaagagatcatcataaaattgtaaaccctcttcattcggctcctgttcgtcaccttgcggaaagattcgtgtccaggcaatggaagttcgaaagcatttgaatcccatcccggcaaataactgaatatctgttttatagcgatgataaaaatcaattgcttcatgattgggataattaagtccgtcgataacgccttctgtcacttcacgcggcaccccgtgagcgccagcagtcattacatcagcgatactgatgccttttcctccttcattccagccaccttccaattgatgtgcggctaccgcaccgccccataaaaaatcttttttaaatcctgacatacacaactccttaactaaaatagattaccaccagacttccacctggatgccggccataaactcgtttttgctgttctcattaaacttaaaattcgataattcgttatccagaatattgatatacgtcccgtagaagcgaatttctggtcgtgaacctaaaatactttcacccactttcaatgcatgccagagtgtcgttttataagccgattcatttagcgttaccccctgctgagttttgttctgttgcttaaaccagcctaattcaagccccgtctgattccatgtattccagatccaggccggtcttattacggtgcgaatactgtcaaaatcactatgagcgccactttcataactataaacatcttcgccatgagaatagacaagcgcgttagccataataatattgtcagtcagatacatctcgccctgagagattaaacgccaggcgatcccattggtatggtcaccatagtaatagcgaccatgcgccatcgtattactggcatctgagaaactggcaaaactgctggcataggaattattggcaacctgtaacgtaaattcattaaacgtatcgcgttgcaagttttgccgtaaaacagaagtcagcatccagctatctttcatttcaaaataactgtcgtcattttcattatcttgttgttgatccgttttattaggtgcggaatatttagccattaatgacaacgtcgcatcatcccataacgggatattgcgataacgaacatccacagaattggtattcatctgactggtacgcgtnaaatcacgagagtaaacatcgacatcatstcggcttaaggacatatcaaacagccctacaccaagcgaccagttttcaatccccacaccccgcggcaacatccggtggttaaggttttccagtccagcatttggatctcatattgcgggagtttatgtttgccgacccagaagtctgcctctcgtgcgaagggtaaaaaacctcgcgttgtcagataaatatcactgaactgcatgatattttcattggcactgtcaccaaaccaggcatcgttatactgctgacctacgtttccatcataggtaacgaccgcatttgccgttctaccgtcctgattataaacacgctgatttaaggtcaggtcaaaccaaccactcatctcgttaccaaaacgtcccagagaacccgctgcataagtttgtggtgagccgtgattaccggtgccccagcctgagcggaagtacccctgatagctgaatccaatatcatcctttatatatttactgatatctttcagggtcacgctttcgatagtggttttatcgcctttactttcaataacggcaatttgctgcgatccatttatagtatgtgctgcggcagacgagttctgttcaccgttttcatttttgatgttatcagcaacgggagatgtcgctgatatttcggcaagcgaggccgattgatatttattttctgtgatgcttttttgtaatgtcgaaagtcggaatttatacactcccagttcattctgtgttgctttcagctcttgtttattttgcgacaattcattttcaagcaattcaaggcgctgctctatggttaattttgttgccatcgcgttcaacggaaacaatgctgtaataatagaaatagacaaaaggctgacgttaagcgtctttatattcataacttatccttaagagtgtagtaatttcctccagatatcgcactggagaaaaaatcaggcatggagctcttttcttaatgaaataatttccctggctaaatcctggcataatattgcattcatcaaatgatcctgtgcatgtatcagaattaaattaacttctattttgccacagccttcatcctgactaattaacgcggtctgaatcttatgcgcctgaagacaggcagattcagagctggccattagtttagttgcgccctgccagtctttttgcccggcacaacgtatggcttccatcgcatcagaacgagcctgtcccgcgttgatcagtaactccataacaagttcttcatctgcaaacatcacaatctccttcctgggtaaatggaattatccgttagttgtcatgttattgactttgttggcggcgataacaaaaggtaaatagatcattgtcgccacacctaaacataaaaaaccaaccagtaatgccagccagtttcccccggttccgaggaaagcaattaaaggtccgggcgtagtccagggcacggcataagcaaccggtggaataatttccatcgaaacaaagaagtaaccaatggcacagttaacaatgggaaccataataaacggcaccatcatgatggggttaagtacaataggaaggccgaacattatcggttcattgatattgaaaataccggggataaatgacatttttgccagatcacggtattccgcacgcttagaagcgataaaaatagccaacaataaccccaacgtcatacctgaaccgccgcagttggcgaatgcatcattaatagaagtccaggtaatcggatatggcgcgccccaggtagtgccgtgttgagcggcccaggagagattctccagattagcctcagaaaaaacggtttctcgaattgccgacgttgtattaggtccgtggatccccagcacccagaggaaattacccacagcccccaggataattaccgcaaagatattcgttcccatatgtttgagcggcgtctggattaatgtgtaaatgagatcatttaatcctgccggggatatcaatgtcaggcaataattaagtgcggaaaagaacaccatgacaaaaaatattggcaataaaactttaaatgaacgcgctaccgcaggaggtacagctgccggcatcgttatggtgattttggggtttcgagctaagcgacaaaatatttcactggtgatcaatgcaacgataacagcaacaaacaacccctgcgcgccgagatatttggtcgtcaggaatgcctgcccatctatcatctggtatggggtataaacaataaaaaatgctcctattgccgttaatccgcataaaagatcatcttgctcatagctaatcgccacattcctggcgaccaggaaagcaatcataattgacatgatatttacagaaccattcattaccggagtaaaaatagcttgtgctttttcaaggttggggaaaatgctgttcagatgcagtaatccggcaataaaaccgtcgggcgataatatggcaaagttaattaatataattaatgagcttgccatgataattggaaacgtaaaaacgaatccatctctcaccgctgcaacatgtttttgtgagtttaacttgatagcaactggaacaagaaaacgttccattccacgttcgaatgatgccattaatcccatttttttatacctgttgtcctggatatttatacatcccaataaagcatgtatgccatatccattttatgatgtgtgaaaagttagttcaggtaatagtttaataatattagattcttactcttgcagtagtttcatcgcaaattcaagaactgcctgtccgttcattgtgccatagtctttcatctcgataacggctacaggcattttcccctgtgcaacggcttcaatctctggtttctgaaagcgaacttgcggaccaagtaaaacaacgtcaacttcgttatttttaattttccctttagcctctgcaatcgccaatgcggaaatattaacttcaagtgaaatagcggtagcatgatcaatcatacgtttaaccagcatactggttgacatgcccgcagcgcaaactaacaatatctttttcatatttttccttactggtatataacagactacattgtgtaaatatcatatcccacagtagctacacgtcctggtacattgatcacagtaatacagcaataaagttgttcaacaacagggtgataattaaacgactcggccatacgataaactaatcaggtctcaactccttgttttcaatggctcttaaaaggtgcaaaagtgatttttcaaaagattgcccgcttacttaaatccgagatcaatggcaattcatggcatgttggtgatttgttgccgtcagaagcggaactcgctgttcgttataatgtttcgcgtaataccctgcgtaaggcattatccctgctggaaggcgaaggaattattcacagaaagcatggttcaggaacatacattcaaaaaaagaattttgttgcacacattgatcacatgaacagtttcagtgaaattgcacataaaagcggcaaagaggcaggaagtcagattatgaaatttgaagtgcaggatgcttctcctactattgcgactgagctgaatttagtgactggtgagcaggtttattacataaagagactgcgattcattgaggataatgcagcacaattagaagaaacgtggatgtcagtggcacgttttcctgatttaaccgtatcgcatatgcaaaaatccaaattttcgtatattgagaacgaatgcgggatcaaaatcattggcacctttgaaactttctccccgacttttcctacccctgaaatcgccagtattttacggatcagcccacgggatcccatacttaaaattcagacccaggctgtggatagtaactctattccgctggattattcgttactttacagcaatattttcgagttccaggtaaagtactttttcccgcgataaaagcagacgcacagagtgctggcatcacattctgtgcgtatggt

SEQ ID NO: 47 - DNA, 57 bp, Escherichia coli
ttgttacgttaaacgcctgtcatcccgacaggtgtttttttattcttcgacctcatt

SEQ ID NO: 48 - DNA, 4777 bp, Escherichia coli
tcgttattacaatcgtctggttttccttataaccagacgattttccctgagttaattaaatccttagcagacgtttgcaatttgcagccgtttgttctgcatcctgaatatcctgttcagacattaagcatcgcaacgcatctttttcaatccaggggttgttatttccggcaattgttagccacatccatgcttgtttattatcaattttagtgcccgtcccctgagcatacattgccgcagtctggtgctgcgcttcggtcgcccctaaacgcgccgctttttcgtaccagtgcagcgcatgattttcatcttttgcgatatattttgtaccgtacagatacatttcagctaacaaaaatatcgcctctattcgaccacgctgcgctgcaccagtaagccattgagtagcctctgcgttattttcaggatcatcattgttggttaaataatatttccccaattcatacatggcatcccctgccccatctgccccattttttgctgctttggtaaaccagtacagcgctttttcctggtcctgtggaatactctcacttccgctatacaacctggcagtatgatattgcgcatgtaaatatccctgttctgctgattgcaaaaaccaacgatgggcctgaacctcatcgcgctccacgccaatcccttgtatatacatttgtcccaactcatactgggcaacctcatgtccttgtgtggcggcagataaataccactgcaatgcttcttcataatttcgtaatggctcaacagcaaagcgtgagatacgggcaagctcatattgcgcagatgtgttgccattttgggcagcaagtaaaaaccattttcgtgcctcacaaatattcttatccggtgccccttccatcgctatacatgatacccagcgcatacagagcatcgataacattatgctgcgcggcgcgggtaaaccagttaaaggctaattttagatcctgtgaaacctcatcaccttcgtaatacattttgccaagagaataccaggctagtgaatagccttgctctgcagcatgtaagcaggactggtatacagaagatggataataaaaaagaccttttaattttatggcatttagcagctttttatatccactatgatgttgcattgctaaattattgaagcgttctgttaatttccacttgcgaatcattttttcttttcgcaaggaatatgataaacactctattaacaatgccatatagttgtctgatagttcaaattcagcaactttatttaatactgcgatatcaaaccatttcaggctctcttcattatcctttaatgattgataaatcgtagccatttccttcccgttttccatttcttccagtggagacaagttactggcaaagaaaggggtaatttgtttttcgatgcgataataaagaagacaactttcgttaatttctgtctggattacgggttgacgactgcctgcgactaaatgccatctgaacgtttgtgctgcagcgagagttaataatggccggaatacccgatgaagatgcagtaataacgtttcttcaaagcacattcgtgagctgagatcttttttctcaaggaaagataacgccttagcaagttgcatgggggcgtgttcgggggttgcttcattctcctcacagagcatatccagcacggctcgccaggtgaattccccctctgatttaatagtgacatcaggaagtggatgaccagaaaaggtgttgggtgcgcgaaatgtcatcacaggacgaggatgaacaatacccctggacatattgatcggttgctcttcttcctcttcttgccactgatcttcgtcgtcataacgtaaagcctgttcataagcatcgtgcaattgttgccaggctgcgggatcatcttccgggcggcaattttttaccagttgcgcataacgacgcttaatatctcgttcttccgcacctggttgtaaagctaatatttcccagcagttcattgcagacgttctctttccagagagtctaatgtaggttcaactttagtccgaaaatcagcaagttgatcaggatcctgcttctcgagtagataactgaaatgacgggagcaattgcttatccagtctcgcgtttccgccagggtgagttgatagagattatcaagacgggcaataaaggcctggtttatctgttcatcgcgtgggtgaatttttaacaggcttaatttggacaacgactgctgtatttgttctgccgttaatgcccctggattctgttcaataaccagactatttttagcacctgtcagtggcacgctgatatcgacatcaagaataccgttaatgtcgtacgtaaaacgaacatcaatacgcacatcaccggccggttttggcggaacattcactgacaactccgcaaggaaaatattatcagccaccatcctgctttcaccctggtagattttaaaattaacctctgtttgttgatcatgtgccgtgtaaaaggcacgaacgcgactacaaggaatactcctgttacgctcaataacgggtgcaaaatagcctgattcgcgggtatgccccagcgatttagaggtatcaacgccaagcgtataagggcaaacatcagtcactacaacatctcgtaattcgctgtgccgcgctttaagtgctgcctgaatagccgcgccctgggcaatgacttcatccgggtttaaatgcattgccggtatacgaccaaataatcgtgtcacaagtttgcgaatcagtggcatacgtgtagtgccacccacaagaacaacctggtctaattggctaaaattaattttggcatcgcgaattgcccgctccagtggcatatggattcgttcgaaaaaggtctgtaataaaaattcaaatttttctgtagtcagatgccagtaatatcgccttccttcaatctccacactgaaagtggcttcatctcgcacactcagcacgcgtttgacacgctcagcctcgatgcgtaaatgccgctggagtgtcggttcacgccattcaatattttcaggaagatcccgacgtgagcaatatgcatcgatcaggatatcgacaatatcttcaccacctaaaaagttatccccggcactggcacgtacttccataatattgtcaaacaactccagtatggagacatcaaacgtaccaccacctaaatcgaataccagaaattgatgttcatcatccttattatgcaaaccatacgccagtgcagcggcggttggttcgttaattaaacgttcgacatttaagcctgccattgtcgcagcggcttttgttgctttacgttgcatatcaccaaaatatgcgggaacgctaatcaccgcttcagtgacttcttcgcccaaatagttttctgcatcttcttttagctgacgtaatatcaacgatgagagttcttccgcacgaaattcccgtccgcccagttttaacgtctttgatgtgcccatcatgcgtttaaaatttgatgcgcagttttgtggtttgatgagttgcaggtcacgagctgcctcccctgtcaaaaccataccatcttcgtcaacacaaactacgctgggtgttaaaaacttacctaacgcattggggatcagttcactttgtccatttcgccagacagctgccaaactgttagttgtacccaggtcgataccgataatcatcgtaattctttttaatatccttataaaataattgttttaaatggtggtatttaaaccaccattttgttcttaatttttgtataaagaccaggtacgttctagtatttttaatgcagcaggtaactgctcaatcattttaccagaaacttcataatcgctttctttgttgtttaatggattaacagcaacgtaggaaatcgttgatgttggcttaattattttaaaaacttcctttgcagattcaccatagatgaaaggtaactttgaattaatagagatttcttgtttatcgaccataaacctggtaatagcagagaaatgagtctccccatgacttataacatagcctttcggaacgttaatttctttcagctcaggaatatactgaacataaaactgtaaatctttcacatagcaaaattttgcactactatcattattcttcgatttacggttttcgcattccatttcccatgaaaatagtccgtctccgatgtaacctgcaactacgcgtccatgacttaaatggtatgcaacgccgtcaacagtgccttgctcttctgaagaaaaactgaattctttattttcttcattatacggactgatagaacaaactatctttccttgaggaaaaattggtcttttggtgaataacatatcctccgacaaaatggtaaaaccatcaatggtggtaattgtttttttaattaaatactcactgcaattgacttcctttaaggcttcttgtttttgagcccatgataattctgcagttgttaatttacgataaaatttttcagtgtaactttcagccgccgcaaagtgtgacagtgacgataaaacaataattcccatgaatgtttttttcatgtatatatccttataggtatgcttatcaaataattcaatggaagtatatcgataaaaataaagccgaacatgttaataaacatactcggctttattttcggaattacacccctattgttcagtcacgcttaactgtagcatcctttttctgcgcagtttttttgaccctttttttcacgtctttatttttctcgtctccgttccttggta

SEQ ID NO: 49 - DNA, 981 bp, Escherichia coli
actgtgccttcgctagttgcatctgttgttaaagtaccattagcactaacatatacttcagccccgactttcggcgcatatttacccgtaccagttccagaatcaacagttaccttgccgttgttagcatcgattgaatacttcgtggtgtatgaaccaattgtagtcatttcaccatcagcatctgtgtatgttgctgttgcattagaaacgtcagtattatcggcatattttgcgctagcagtaccgtcacctgcggcaaataccgcctgatacgtctgaacgccagatttataggtaattgttgcggatgtatcaccgttagctgcaactgctgtgccttgtttagctgtagccactttatttaaaacggtttctttgctagctgtatcagtgaacgatacccctgcgttagcagttgcagcaccagcatcagcacccgttttaaagttataagttgttccccccatcgtgactgatgcagtcttattaaacccgattgattgaccatcaccagctttcttgaataaaccatcaagcgtagccgcagtcgcaccaccagcatcgtttgtagttaagttaccatcactagttaaataggcttcctgtcctccgattgtaattttaccattcgcatcaacatcaaagttcacttcaccgcttgctgctttgtaaacaccactagcagtttgcccagccggcgggagaaggctagctgctacatcacctgcttttgctgaagtattattcgatacattactgaatgagaagttaccagcagatgcattgtatgtatagaccgtggcagtttgagctgcatctgctttgatagtaacagtgtcaccatctttcagttgatcaagggcctttgatgcagtcagcgcattatttgttgtagttatagtattagttgcagcatccattttcgctgctgtcaggtcgctaatggtcgccgctttattggctatcgtaccggaacca

SEQ ID NO: 50 - DNA, 4136 bp, Escherichia coli
ctacacctggatggacatcattgtactatgccccgtacatgccccatcacatcctcaacatcaaagtattagagccttgcaaaccattatgcgtctcagtttgtctcatctatcttacgcaaaaaaaatagaactaatatcaagcggcgctatattgcgtattaaataaaaccacctcaattacattaataaatctaaacaaatatcatgcaaataatttccatggttatttttaggctatttaaattaaaaaaataaattatgagtcaaacataaataacaacctttaatataatttgactaccaaatttatattcgttcacaaaatagtcatgcattgtgtgcaatagaaacagttcagataaaaatagggatctacttcacaatttaaatgagaaactaaaacttacatcttgaaataatctcattgattagatgaatatttgtagtgcagtgacatcatttttaaataatagttcaaataaaagggctcacgatgaaaaaattaacagtggcaatttctgctgtagctgcatcagtactgatggcgatgtctgctcaggcagcagagatttacaataaagacagtaacaagctggatctgtacggaaaagttaatgctaagcactacttctcttctaacgatgcagatgatggcgacacaacttatgttcgtctgggcttcaaaggcgaaactcaaatcaacgatcaactgactggtttcggtcagtgggaatatgaattcaaaggcaaccgtgctgaatctcaaggttcttccaaagataaaacccgtcttgccttcgctggcctgaaattcggtgactacggctccatcgattatggccgtaactacggtgtagcatacgatatcggtgcatggaccgacgttctgccagaattcggtggcgatacctggacccaaacagatgtgttcatgactggtcgcaccacaggtgttgcaacctatcgtaacaacgacttctttggtctggttgatggtctgaactttgctgctcagtatcagggtaaaaatgaccgcactgacgtaactgaagctaacggtgatggtttcggtttctccactacttatgagtatgaaggattcggtgtaggtgcaacctatgctaaatctgaccgcactaatgatcaggttatctacggtaacaacagcctgaatgcatctggtcaaaatgctgaagtatgggcagctggtctgaaatatgatgcgaacaacatctatctggctaccacctattctgaaacccagaacatgactgtttttggtaataaccatattgccaacaaagcacaaaacttcgaagtagttgcacaatatcagttcgacttcggtctgcgtccgtccgttgcttacctgcaatctaaaggaaaagacttgggtgcgtggggtgatcaggacctggttgaatatattgatgtaggtgcaacctattacttcaacaaaaatatgtccacttttgttgattacaaaatcaacctgattgataagagcgatttcacgaaagcatctggcgttgctaccgatgatatcgttgctgtaggattggtttaccagttctaatctgattactcaaagatatgttgtgggaggctttgcctccccaacatataagtggccccctcaagccactttccttagaagcactatcttgcttctgactatataaaccttctgttatatattaccctttattttctggggcgtttcaacgccccatttttaataatactcagtgaacaattaacgtatcaattagatttaataacaacgatatccgtacctaaccggatatctaatgtcataagcatccctttaattatcccctcaacctcttgtaactttcccactcttgaactccacatagtccaaacgccggatgcaaaaaaatcacacgtgcatttctgaaattgtgatgaaggaagatagtatcaattatatgtgcttataaacgaccccgattagcgcagaagtcaccggattgttcaggctccaataggttgagtatgccgtatttattttccaaaataaaaatcgatgctgttgctccttcataaaatacttttactctctggacgcttttcttagctctcttggtgttatcttaaaacgattatggaacctttcagtaaaacgagaaggacacttgtaaccattttccctggcaatctcgctgatgggttttactgtcgtttgtatagcagacaacgcattatttaacctcacgtcgtccaatatactttgaaaacttattccctcgcttgccagacggcgatgcaatgtggaaacagaaatgtagagatatctcgctaccttgtttgctgtccattttgttccaggttcggatagcattaggttataacaacgacttattaatgattgtttactatctgataaaagtaaacaattaacatgatgtgctcctaatgaaagtagaacgcccattgctaagtgttcctgaatttgcgttgagaagcctcggaaaatagatgtttttagttgctcccaacaatatattaactcggggttctgaggtaagcagaaacctgtcgtgttacgaatttgatcagttatcgcataaaatttttgaaacttttcaattagatcaatgggataataaagcatttctgcaagataaagacctgcttctggataattcgcaatataaaattcatatccacagggaaataatattatctgattattatcaacagttagactatgcgtctcccaattgataactttttttccctgacggatacgacataaagctggcataagaggcttaaccctgtgaatctcatgatgtttatgcatccgtatttcttcaatctttaggttagacttatcttttgccagcatactcttaccctactttatctcataaactggtgttatctcagcggttgcaattttattggcattaagcatataaccaactaacgctccgctggaattagaatccacaggaatcttatcagtttttagagcccatactttaaactggtaatgatggggtttatctcctttgggaggacatgctccaccaaatcctgcataaccaaaatcatttcggccttgaacagcaccagtcggaagttttgtaccatcacgtcttcctgcatcagtgggcaaatatgttacagttgctggaatattagcaacagtccagtgccaccatccactgcctgtaggagcatctggatcatacacagttacggcaaagcttttggtgccttcaggagcaccagaccaggttaatgagggcgatgtattacccccttcacacccaaatccagaaaatacatgagacgttgtaagttgctctcctgtttttatttcattactagtgacctgaaatgctgcggcctgcgcagaaaatgttatgaatgccaatacacttgaaacgataagttttttcataaaaacctcattgttgtgacctatcgttattttatttgatgtgccttgatctcattatgcataaaggcgcaatgatcgcgcaaatgcaatcataattataaaggtgccccgaacattagccataatatgcacaaatcagattcctgttatctcaaggataattattttttaatgcggtgcacttcgtgacaacaagttaatgactaacacaccggcacaaatcaacatcatgcctatgatagctggcaggtccagtcgttgaccaaaaaatccccaggaaagcaaactaatcagaacgataccgactcctgaccagatagcataagcaatccctgtaggtatataagccagcgtctgagctaataaccagaatgatgcacaatagcaaataattgtgccaacagagggccataaccgtgtaaacccctctgaaaacttcattaaggttgtaccaatgacctctgcaagtattgcgccaccaagataaatataagggttcatagcatattctttcctgttcatactggagagaattgtactacagtttgaacacaactcaccgttttcatcctggtgtatgtgtatccagggggctctggcgtggcaagagataaaggcaggaacaataatgatcagaaggaaccccaggctaacgaatgagttcactcttcctgggagcaaagcgaagacaaaacat

SEQ ID NO: 51 - DNA, 492 bp, Escherichia coli
acaggcaactacaaagcaaatggcgatggccatggtttatctgcaacttacactattgacggtttctcatttgctggtgcttatgcaaactctgaccgtactgattggcagtctggtgatggtaaaggcgaaagagccgaagtttgggcgttgtcaacaaaatatgacgctaacaatgtctatgctgctgtgatgtacggtgaatctcacaacatgaattccgacgacggtgatgttgtgaacaaaacacaaaacttcgaagctgttctgcaatatcagttcgactttggtctgcgtccatccatcggttactcctattctaaagcactggacgtagcaggttacaaagattctgatcgtctgaactatattgaaatcggtacctggtattacttcaataagaatatgaacgtatataccgcttatcagatcaacctgcttgataagagtgattatgttctcgctcatggactgaacaccgacgaccaactg

SEQ ID NO: 52 - DNA, 217 bp, Escherichia coli
ttgcgctgacttcagttatttaacagaacagtgcctggtagtaacaacaataatttaccaagacaaataagtaagaaaaactcagacacgctcatacttgagtcgtgtcttttttattatgtctgtagaaaaaaactgagaaaaaggcgaacaataaatacacaactcagccatacagattggcagcgcaaatgtctccaggagcaagtcatctgtc

SEQ ID NO: 53 - DNA, 22507 bp, Escherichia coli
tctaaatttttagtgttcgacaatgcccaccaaagtgctatttttcctttaaaaacaaaatattgtcattatttttttgttcggtagtgtattgctactgtgcaaacaatcagctattttatgcagtaccgtatgtatggcgggttgtatgacaggattttgctatgccaaagaaggccaaggaactctcaggactcgtcgtatcacgattaaaatccgaaggcatgtatgccgttggtggtgtggatggtttataccttcgcatccgaaatcagtcccgtgcatgggttctttgcgtggctatgggaacccgaatcaacaatctcggtagaacagttccaagacgtttgaatatgggtcttggcccttacccggaagtctccttagccgaagcgcgtgacaaagcgcgtgagctacgtaaacaaatccgtaatggtattaatccccttcaggaaaaacacgagcaaaaagcccggcaggaaatactggcccggaagaaaaagacctttgccgaatgttgtgaagaagtgctggaagtcaaagacagtgagatgaagaacaaaaagcatctcgcgcaatggcgttccacactggagacctatgcctaccctttcattggcaaaaaggccgttagtgaaatcaccaaagtcgatcttctggcaatactggaacctatctggttaaccaagaatgaaaccgccagtcgtctacgtggacgtattgaaacggtgatcgattacgccaaggccaaagaatactttgaaggtgataatcctgctgcatggaaaggtatgctgaaacctctcctgcctcagccaagtaaagttcagatcaccaaacaccatgcggctcttccctataaccagatcggctcctttatgaaagaactgcgtgaacgaagcggcgtttcgcctcgtgcgcttgagtttgccatactgaccgcagcacgctcaggtgaaattcgtggtgccgagtggtcagagatcgatcttgaaggtaaaacatggaccatccccgccagtcgaatgaaagcaacgaaggagcatcgagttccgttgtctgatgctgctgttgccctgttaaaggctttaccacgctttaaaggtatcaattttgtattccctgccactcggaagggacaactctcggatactgctttactggcagtcctaaagcgaatgggatataccgacttaacgcagcatgggtttagatcgacattccgtgattgggctggtgaaacgaccaactacccgcgtgaggtaattgaacatgcgttagctcatcagttggcaaataaggcagaagctgcgtatcaacgtgggacgttatggcctaagcgggtggcgttaatggatgattgggcggggtattgtatttcttagacatacttgcggatgacaaaagctcaacttcctttactatacggacaggtattcatatacaataaatttctaatcatatttgattaaaggtttataatttaaggacatacaatatgaattatatagatgaacatgatataaactactcacgatatggttttgaatcgcttgcattagctcatcccgaaatagatataaagggattatggcattgtgattcaaaatattatgtgttgattgaaaaggatggaatactcactgaggatgacttaaaggaatttgaaaagatacaagaagagcatcgtattattggtagccctaaattattactaacacaaacactccctaataatgcaataaaaatcgcaggaagagaaaactacgaagttgctctttcttttggcgcaccatacacagattctgagttagaaaacatactttatcaatatataaataaaaaatttcatccatttaaatacacacttaaattaccatctcttcatctggttttgtcattcccaagaaaattgagtgatgatgaaaagtcagaaataggaacaacattatacagcgtcggtattaaatatgtaattgattatttaatagatgattcattattaaactttgaactatctgaaaaaaggcactctgatgcattagcgttaatacctaataaagcattacctaaaagtgtcccaacaagagtaagaaacctgcatgaagaagatgaggatttctggcttgataacagaagtttaattctcacttcatatgacttcgaaaaaagtagtgcccttccaacaagttttaacaaaaaaaatagttgttgtttcgttgatgcgcaaatttttaaaccagataatataagaaactatttatcagtttatgaacgagtagtgatatcatatccactcatcggacaagacaatgacttcttagaccatttaaaaataccgaaacaacatttactagagttaatatcgagaggtagaattcaatttgcattaccacaaaacataataagatataacttatcatttcttgaagaatgcctaaacactaatcctgaatgcattattctgtccagacgattagcatcatcctcaattattgacatcagaaataaaacaggttttcttgctacaacattttctttcgaagaaaaattaaatgttctcaaaacattgagggcactggatggcaaaatattcaacttatttatcaaggccctatctcaaaattggcactcaatggagatgaatatccatgagcgtggagccatgggtgtttcaaacattggcatagcccccgtcatgtcagagttattcaataggcaaggacgagaccttcttcttgaactattattttctgctatgccattggagtgggcgatggcattaaatgctgatttttatccataccacagcaatgagcattcacaatataatgcttctgcatgttgtttatatggatataatggttttagaataaatgaagaggctattgtaaaatctaaaatcggtgaaatagcaacaagaatactatcaatcgataatgacatgtcagccttagaattagacgacgcaatacttaaaggtgatattccgaggataagggatttttcaagatcgttgtctaatttatcaagtgaagagcttgatataaaaatttacgaactaaacaaagaaataaaaaaaatagaaaataaagaaagtaaactttcttcattagacttatgcggacttatagcatcaacaataggtgtttacgatgacaatccatatatcccatttggatttgccttttttaaaataatctctagcgtgttaaattcaaatgatattagctcgaaaaacatcgataaaataaaatcaacacttttaggtacgcaaactgaaacattgttaataaaaagaacgaaatccagaatgtaattagcatgcattttttgtaaattaacatacatgtcatatttttaccattatctttggcatgtatgttaatttgtaacaattaatagtataaacgtttaatgggaatttaatattttatttgcatgcatataaccttctaaaattactataacagtgctcgttcttactaccactacaacgacgttcatcatattccgcaataagtgttccagataaaaaaccataccttgagtcatacatcgaccccggacaagcacatgcacctgtatcactattgggtattacacatttatatccagatgtttgatcggttattgttataaaaatacctttcaggccatcaccgcttgctgtctgccatttaccactgacacacgataacactcgacctgtactgtctcgccccaccagaccattaggcgtacatttcgcatttaatgttgcctgaccattcaaatggagatattcacctgctttgattctgcctgttgattcaattgttccattggattttatcgttccagcagtaagattacctgacgcataaatattacccgcattgttcatgtaagctttaactgttttacctgttcctacaccaacagtccctgacgcatacaaatcataggtgcgaacaccaccagcccacccagcaggcagatcgtttggattaagtccattcgtcgcgatacgactaccaaacttcgccagacctgttgttgatagcgtgttcagataggtgtcggattttactttcaggttgttgttgatatttacaggaccattaagggtagatgttccacccacactcagatctgatgcaacagacgcattacccgttgtcttaagtgctccggttgttgttgtccctgatgccgtcatatctttgatgtttttgatgctcttcccaccaagattcagatcgcccgtcatcggcaacgtcccatcacgacgcagataaacagaatacattgaagagttataccccacgcggtaagccagtaacccaccccccgtgatattgctgtagctattagagttctcactccactgaccaccatagccggacgctatcttggtgtttctgctcatcccaccatcaacacctgccgcctgaaccgcttttcctaacaggtcataacgaatacgaccaccttcctcccacgggctggcggttgttataaggccattaatgacataatcaggcgctgttcctgaacgctttaacacaatcttgtaggatgctttttgcgcgttcgttcctgtatagcctacaggtaacagaccttcattaattaatgtctggtaagtgatttcacaaccagcagccgaacaggttcttggccccggatcgctactttgattgttggatgatgacagtgtggaaatcttgtcataacgaatactgatatagcggttaaccgcttcaccaagctgtttaatctgtgttccgacattatcagccaataccgcttcctgatcgtttctcatatcctgaaacttcataaaagcgataagcgttccaatacctaacacaatcgtcacttccagtaaggtaaatccttttttctttatcataattatctccctgttttagcaataagaaagaaaagggcctgcgccctcttcattaaatagacgtgaaaactaatgtattacttgtggcattcgtacatgctgctgccgtagctgccacatcgagtgttcctcctgcggctttaacaaccttggttccaaccgtagtaatgtagaaattacctgccgccgctgtcgcaatcttcacacattccgctgctggcacattatcgtatgtgatagtgaaagaagagccagtcgctgatgacggacctgtcgctgtagcagccagcgtcacattacctttaaaggcattgatgggtttagcagccgttcctgacccacttaacatattgtcagggaagatttttgcctgaacagccacagtatttgtcaggccagtaaagcttgatgccgacgtgtataacgctttaacacctgcctgtatggtggcaatgttattggattctgcctgcgctctttgtgaagcctgaaccttgggataaacgataaaagcagctaccactaatgcagcaatgatgcccaaaacaagtaatagttcgagtagtgagaaacctttcttgctttttcttttgttatttaataaaaccattattatctccttttttgttttaatgataactcctgttataacgcttctctgatatctggcaatagaaagagcaagatatatttaactctgtctgacagacggatgaattaaaaaaggcaaagatttctctttgccttccgggagatttaaaaacaatatttgttatcactactactgtcattactacttcctcatgggatatttatcatatctgataaaaaagtaataatgacgttcactacataaagataaaaattaacagattactggtcaaacagaacgcatgattgaaaaggaaaaaaatattaataaaggattatcctgcattctgttcttttatatagataacagataataattagatatcaatacctgaatcaaaataaatttaaagatttttatttttgtcttctatccatttgcgcgagaaacttcctgcctgcttttatatacgttattctttcaatatcattcaggtcagatactgaaagcaaaatccccataacaagctctttatccacctgttcgatatcgcaatgcatagccttagctacttccgcaccaagaataatctttagccttgtttcaactttcttacgttctgatttctccagagacttaagacgattaagttctagttgagcaaaagcaaccttttgctttaatgttttttctgttcttgtttttttactttcattatccatagttatcacctcttgctgtttatacgtatttaattatcacaaagagaaataacgtcaaatttacaccattttgtaagagagaatgattctgatacatttctttataaatatgtgcaacgcatatgatagtaattactaacttaaaataccccgcactctccgcgttacttatttttgcgcattcgtgcttttatttttacctgtcattttcaaactctatttcccaatctcaacctgtgaattgtgcaacacataacactgtctgttttattcgtttttttcatcaaatttagcagccccgccttacggcgggaataattaatacttcttttgcccttacgggccttatctttactctttttgtcctgtggacgtgaaacctacacctttaatccagtttgcgccgcttaacccggcgtattattttacaaccatacatatatttcgtattaattaataagaggggcattttacattggcttatttttttaaagacaatgcccacctatacactgctacgcagtgtgtggggtctaccgacggttgcctgccgcaggctaaaagcaaaaccaaggtcaacgtcaaccccgaagtttttcttacgaaaaactaacagtagcttatatatttgagattatatttttaatggcgatttttcatctggattttaaaattgtgaaacgaagcgaaggcatgacttccgttgcgaaagctgcctaccatgcccgtacacgtattacagatgatcgcattggcgaaacatttgatttcagccacagaacagatcttcatggtcatattttattagcccctgtttcagcacctgctcacattgttgaaagttcctcagcactctggaatgaagttgaaagagtggaacgccagaacaacggtcaaacagcccgttattttgatgttgctatacctgtagaactcaacaacgatgataagaaaaaattggttgccgaatactgtcagaagaactttgttgataaaggaatgattgctgatatcgcatttcatgacttggatagtaagaatccccatgctcacgtcatgttaaccctgaaaaccattggtccagacggcttcggtaaaaaagacagaagctggaatgataagaagataatgatccaatggcgtgaatcatgggccaccatgtcaaacagctaccttgaagccgcaggcagtgaagaacgtatcgatcaccgttctctcaggacacaatgtgctgatgcccttgctcaagcagaggaagcattcagcgctgaagagaaagcattctggcttgccaaagcaacagaaacaaaccgcccggcaatgcaacgtgttcatcgtgctaaatggaatgacaccgagtcacaggaacaacgagctgccgaacaagctcaacgtgatcagcaaatagaggaagcgaagaaggtctatacgatattcagtgagctaccactggagatcgtggttgatgtcagaagctttacgattacacatcttgctgaacccgaagagatcattatccctgactacccagcaacagtagaaccgcaaccggctatggcgacacctaccacaagcagaagaccagcagcaaaatcttaccgtaatcccaataaggtcagtaaagtaaatgtttcagggaagaaatcccctgttctggttgttcctgaaccaaaagcatccactaaattgaaaaccccatctcttcaaaacaccagagcggtgaaccgtgctcccctacatatcagaaagcagaccaagccacgacaaaatggtttgtttaaacgtttcacactactcatcgtagacttcctgaaagagagatttgtatgggcgagaaggaaaactgataccactgatgctgaccatgataagcgtatcgctgaaaattatgtgtttgatgaagtgctgggtgtcaatgttccacgctcggagtttgaaagacgcgctaagtttaacaataaccaaacatcacaagaagcaggagtctatggtaacgaatcaaatattaacaagactgttcgtttcccaaatcgttttgagcaagaacaaacggaggtcaataaacacatggaatttatactgtctattggtggaaaaccttctatgccaaagttaaaacaaactaacagaaaatctaacatcaaatagtaatgttatccccactattaatttttaatcaaatgcatgttacataggctcaaaatgtgatagcatatgaaaacatagaattttttatatgcttggtgaatgttttgggcaacaatatgtataatatccttttcttcatctttctttcaatagcaattccattccttttattcctcgcatggaaacagcacctaaaaaccaaagagattcgttcatatctattgaaagagggatataatattattttcaacggagaaggtaactcatatctcgcgtttaatattagtaatgcgacatttcgcgcaggtaatttaacttccaatgattattttcaagcatcaatttcttatatccacgattatagatgggagtggaaggaggttgaggcaaagaaaataaataatatatttattatttacatttcgaatattgatttcccttcccaaaaactattttatcgcaataataaatctttagcagaaatagactgggcaaaattacaagcaatttttcatcaaccatatgaaatacagaatgacgtcatgcaagataacaataatacgcactatgattttttcatatcccatgcaaaagaggataaagatacttttgtcagaccactggtagacgagttaaatagacttggtgtaattatttggtatgatgaacagacacttgaagtcggcgatagcttaaggagaaatattgatttaggcctaagaaaagcaaattatggcatagtcatactttctcataactttctaaacaagaaatggacacaatacgaattagatagtttaattaatcgtgcagtgtatgatgataataagattatattgccaatctggcataatatcaatgctcaagaggtatctaaatacagccattatttggcggataaaatggcactgcaaacttctttatatagcgttaaggaaatagcaagagagttggctgaaatagcatacaggagaagataaagcaataaatcataagtgcttaatatcttcgatgcataaaattaattgtattagcacatctaaatagtatgtttgttatggaatgagtgttccgtgctcattccacatattgtttagtatacgttgaaatattacagacctagcttagtataaacagatgtagggtatagataactaccactatttgaacttgagtaatagttaacacagtaattatctaatgcatatttaataattttaggttggaaagagacagatactgtataatgttctgaatctaaaagtggtttaggaatgaagttcttatcgactgttctatctccgtctaaattagctattacaacaggaagattaaattctacgataagatctatttcatgggcaagaaacgatactccatcgctaccttttctcttagtattaccgcttcccaacagtactacttgtttagcatttttcatcctttcgcggaggtttcgctttatggtttcaggtttacttgtatcccttgaaataaagagatcatgagcatcaaaaaagttaaagtctattttttcatttgctttccatgcctccataagacgataaaactttatatcttcacttgcaaaagccacatatgtcttattacgataactcatatagtccccatgaagcagtcaacattagtatcaacatgttgaaaataccttatatatcagatagtgtaaacatcatttataagaaactactatcaacacacttgaattacatataattaacaaggttggtacaaaaatggcgaaagttaattttttcgataagcgtatacttaaaaaattttcagactacacatcaactattagtaccatattttcactttttttgatttttgtagacattccaacagaaaacaaactaacacttggtattatatttttaattattttattcttactgtatttcggcatatggtttaaatcaaataatctttcggaaattaatttagatgttgagggcagcattgttactgtaaaagcaggcgatttattcagacaagatggattcaaggtcattgcttttaatgaatattttgacacgcaagttgatgatgttatcatttctcataattcacttaatggattatatattgataactatttagcgggatccgtatctgatttggaccatcgtatttcaaatcatcagtttgaagaagatgaactgcttgaggtcaaccataaaagaaaagtgggtaaaacacaaaaatattcgctaggaactatcttcgttaataatgattatctattaactgcgttttcaaaatttgacgacaaaaatagagcttttcttacaatgccggattatctagcatttttaataaatttttgggacaaagttaatcgtatatatgctcaaaaaagtgtctctgttcctatctttggatctggaatcactagaataaaggaacataaaaatattagcgatgaggatttacttaaaataatgttgtggacttttagaataagtgaaatgaggtttaaatttccggcaaagcttactatcgttatccacaaagataagatagataaaataaacttattggatataaaatcagcgagaaatggtctttagttatatttatatatgggcgaactatgaaaggtcgcccatcatataattcttttcgttttttatatctttcgcctaaacacaacattatcagagaatatcgccttaccagctataaacccaacaaccgcaattattggtagactgatagtagctcctgccatacctgttgacataccgatcaacgtcgataaaccaaaagtcaacaacaaaacaacagcagcataccagccgggataagtgccatataacacagtcgctaagcaacctgtgcaaacgtgaaccccacgctggctctctttgaaacagaacgggcatttgatggtattgttttccatattggtttccttaattggctttccagccattgctggtcttaaagagattcatggcaccatcagcaggttcattcattcctttaacgctggcgaatgcttttttgtcaatccagcccggaacgtcaaccagcttccacgtataagtcacgcgaactactttctgattaccgtttcccggctcagtccattccttaatcccgtcaacagcacgacgaccaacacaggcaccatctgttgtgctccagactttggcttttttgccttcctctgttatccctaatacgttcgaatcatagccctgctcaaagaccatcattccctgctctacaaatccatcgaggatcactgaattcgtccctgtaccagtcgaatcaagtcgtggcttggcaagacggatggggaagctggtgttattgttatccagcgagaagcaatatttgtcctgccctatcttggcattgatcgccttctcaaaatcacctttctcaccacatcccgccagtgccagagctgcgccagcaacgagtaaaatcttcttcatctgcttatccatcctgataatcaaagtgcctaaatttttgaccaaatctggtcagggctagagttgttgcgggatccggctgatatcacatggcaaaaccaccgcttaaccaattgataggattcaattcttttagcgtctcgtcatatcgtttaaaacgatcaaaaacaacctcatgatagccaatagctatcataaataaatattcgatcgataaaaacaattaataaccgatcaatatcattgttttaatcgttaaagcctatcaataattaattatcgatcttttatatcgatcatgatttcaagttctgatagccttgcaacgccgagaccgacgccatgagcttggtgctgtaggacgtataaaacgtagcaaagctctgtgagcaggttcagtctctttaactcatttacatggaggaagtaagattggaagcagtaggtatcgtatttttagtggtgctcttcatcatcatcatgacagcagtagatatacaaaagaaaaagcactacaacagctttacggaagttctggacggcgacattctttcgtatgaatgccaacagacaggtattgttattgatactcaaaaacatactgtccgtattttcaataaagataaagacagcacatatacttttgatcaaattcgagaaataaattatacgctttcagaggggggtaagttttatggcaatggaacattacgaggtatgaataatgcggctattgctaactggagagaacaactttcagcgaataaacggtctggcctaaatattttaaccgatgatattaaaaatcccatgtggaaagttaatgttcccctgaaaaatttaagcacctcaaatcacgaactttgcgagcgatggatgctggtatttaaaaagtatgttttctgagtctcacctttcatctatttctggaacaaaaatgaaaaaattattacttgctatttttataatattaccacttggtggctgtaccgttcatggtaataaatccctaactgatgaaaatcatcagacggttaaagttaaaatcgtcaagggaaaaacaacccaacaagaaattcttgctgcctttggagagcgctacgaatgatggacaggagatgtggaactactcaagtatgacgggagaaagccaactatctaactacataccgggccttgctctattgaccaatagcagcacagcacacattaaatcactggatatctggtttaagggtgatgttgtggaacgttatgattttcgtcagactgcaagtaagacctcacgtggtttgatggattgataatacaacatatcatcgtaaaatcgggagttgctacgtatgaactcccgattttatttcatgatattatatcaattaaatactaaataaattacataacaaacacttcttgtatattactaagcgtcttagcacctataccttttatgttttttaaaatatccagatcaagcttgccttcacgaactcgtgctttaacaatttctttagcgattgttctatttatatttaacaatgcttccagttcatctaaagtagctttattgatatcaggcttagatacagaggttttggtatttgacatatactcaagcaaatccgccactactaaatacgtgtgaaatactgactttacagcttcaatccgatctaactcggcatgaacacctttatttgttaacttattaactttatctaaccatgatccgagaaaatctatatgtgctttggcaaggtctttattactatcagactgaatagccccatccataaatgcccaaaggcggtttacgtattgaccttgcccaacggcccgaccattaaatttttccttcgatgccggataaagttcatcagccaacccttctagaagcctacgacatgtagttaaagcttgagaccattcttcttctttatctgaagaaatagctttaaatgccaacattagttgttctgcgatcactggatttagatctaataatttatcatcaacagcatttttcaatacatcaaaacagttgctgacagtacctgaaaattttagttgattatatatttgcgatgctaattcatgtgctttttttctaacataattgatatgttgatttaaactattcttataatacgttccgtcattgccttgtttttttcttacaagatcggcatatttctcttcaataaacccaatgttattatatccaccaccactttcaatattttttaatgtgagttcttcatctgaataatgtatattagccttaactcctaatttggcaagttcttgtattcgtttgtctaaattttcttggaaagatttattttttgtattttcagcctcaataacaaacttaagcaattcagttattggctttgtatatttagtatcacctaattgaatagcacaccatatctttttatcatcatcattgatgatatccgaagtccgctgtagtttttgtatagccgataacaaagaaccttttggtgactcgagttctttaagtgtttcttcaatgagctgtaatgctactttcttgtgtggcatgtgaatcatccttcaacttatagcttcgtaatcattaagtggtagattgttgcttttaaactaaaaatgaaactctggtggctcagccattttaataccaccaatacgtatgggcagctcaccttctcgttggcacaggttcttaatagattgccactcctcagcttctgtttccatgtgagcagcgaccgaatcaaaagcaccttcggctacgactatagtaggttctttatctgtttcattgccattcgaatccacttttggtacttcggccagttcttcttccagcccagccaaactcactttcagttcatcaagactactggcggcgtctattggcgcatagaagaacagcccactgatgaagatagcttccattacctcactgaaagaaaacgaggtatcgccataaacaaagcagccatgcttggaactcttcacccctgatacattcttcttcaacaggccgtcctttgccgacgtcatcaacgcctgtttgctatagaggattacaggaagatttttaatttcgtgaacatcaccgctgatactccagcgttctttatcacctttaatgaaacctgaagcatcgcagctactttctatgtcaaactcatcagtcgggaaccgctcacgattaaaataggtcgaaaaatcttccccttcttccatatcctgacgcttgtaagcgcgataaaccgagctacgacggtcaatcccaatccattcaatatcccatgtcgttggcccggacggttttcttacctcatctatataagcaccaacatctctgtccagataagctgctaacagtgccttccacagttctattgccagaaagatacttgccagcgatgttccttcttcaatcagaacagtatggtggaagaagcgaagaagaaagaagggatcggtattggctatcgtgttctggatggatagcaatggaaccgccgaggtttcatcgtaatcggactgaaaccgcagtattgcatcggaacaaaaaattaatttaccttccatcgctcatcgcctcctgacgctatcagacaacgcattttaccagaacactaccacttaccgcattcgactttaacctgacccatgttcgttgatagctctggatatatattcaacccaaaagcattgaccttatggataacatcacaatatctgaaactgataactcagattataacatctgtgattttatagtttcttcactcatttgtgtgagttctgaaaccaagcgaatataagtatttttcaacctatctttatcgcaacgacttacagactccgataacagataatggctataattattgacataaatatcattgtcattttcaatgagtgagttttattccatgttcagtatcttctactttgtttacaatacagatcataaatggtgttttctcatagggatgaaagagtgttatcattttaatatttttcattttattttttacttttttattactatttaatacaacatcgcgatcgtgaaaatcaaatttatttattttttaaccatgattttccctcttatttttaaactacttttgaaaaaatctttatctctgtgctgacgcacggctacgccctgacgctgacatttttattttattcatctcctgtctgttaaataaaaagaaaagcactcgatcattgtttgatctcttttcctcatgatgctgaatttagatcctatgtttaaacatagtttttccctttagacatatagcatttgctcttaaacgtataggaaaactacatccttggtagcagcgcttcgtgattgttgcgaacaatcactctgctgaacagggcttgcccctgttaatattggatttatccaaaaaagatcgcgtcgtagacgcatataaagttaaagtaaaattaatcaagcagtcccgatagtagcagcggttcatgattgtagaaaacaatcacttcgctgtaataacatagtaggaaaaataacacagataacaccactggtgccattttgataaggcaccaatcaactaaagagaagaactattttcaatattacattctttaaaatgtcatccaaagcttcgctatttgaataatgaagaagaaaaatgctctcaagccagctatagcttaaaacaaagtacgcactcttgggagttaaagtcccgaatcccggtacttaagttgataactattctcaaataaaaataataaagtgttattgtatatattctgtagcactacaatttttatacgtaaaaacatcaagtgttagttattttaaaaaatataaactttaagtattgacttgcacacaaaatatagtatctacttaaatgtataactaaaaaaataaaggagtaaataccatgatagaaaataagatacaaactgaagtaaagaaatcaagaagaggtctcccacgtcatactaaaaacccatttcttaatgatacaagtctacatacaaaaactggcgtcagacgtattactacaggaaaagatcgattagcattagttaatgagagtacgggagaacaagttggtaatggtggtttctttcagtctatggaagtagacaagacacagtttgtgaagctttatgtggatggcgtatcagctattgagggtttatcctcatccggtaagaaagtattcaagatactgtatcttgctatcagagataataaagatacagatacgatattaatgtcattcgatattgttgatcaagatatcgtgaaaatatcaagaactacttatttcaaaggtatgaaagaacttgctgacaagaaatttattgctgagaccatgatacagaactattattttattaatccagactatatgtttaatggtgatcgtttaactttcatgaaaacttattacttgaaggacaaaaaaactaaaactaaagagaacaaaattaattgccaaggcaaaacacagtagtttcaagaaagagattttctcaagcaactcctatctgaatgataactccataaagccaatgcattttaacaaactcccaccctactataaaaattgtatagggtgattaaaaaatgaagcgaaatcgaatgagaaaacgttttttatataccagtttacaaactcatatcttggagagctgctttttatcattgctgacatatcaattatattatgtgttgatctacgtagttctgatatatagagaacaaaatcaacatgttcataatgtggattttcaacaagaaaattaagttctgccattacatattcagattcataaggcattatcgattcattaagaataacaagtccaccgactgctctaggaatatttaaagattcctttgttgctctaatctgtctattggaggttgctacaagatcttttatatttctataagcataatccattatcttttttctgaaagcatctgagtcggggtgtttttgaatcaattcctcaatatgaaccctaccgaaccaacttcttttaagccattcatcagtcttagctagctcattaattttttcatttattaaatcagttctgtcatttgtgagtaatttttgctctaaaataacatcgttattaaataacaaataatctgccattttcgaactagagccatcgtcttttttgaaatcatccttcatatcgtccaatactatattatttttcttagatcgaataaaatcaagaaaccttttatctatagaatccatctttcctaccttcagttttatttcatcgtcccgagcctgatgatacaccatgtcatttgtctcttacaacattattaatgtattaagcatggccataataaacaacaaaaaaacattggcgagacaaatcaacagaaataaacattgctgcaaacggttaatttgacacttacaccatatctcgtaatataaatatatccactattttatccacgaggttttatatgagaaaagtaaaaacagacaacagtgatttaatcgaatatgtaaatacagttaaagaactaaaaaatcacattccaatagaagaatacagaaatgaatatcgtaaactgcgttctgatgatattccattggttaaggcgcaaaaatttaaatctgcccataccgaagttcgcaggttggaaaaaaagagagaatctcttattgaatactttattgacgagttaaatcccatcagcagttcaaaagctaacacatcagcaagatcaactggtaatctcgatttatttaacgaacgcgtgttataccgtaaggccatttcagaaaagagcgatgaagaaatagtagccttggtcataaaacaacgtacagaagccgctgttgagttccaacgttcaattgaacagagtcttgagcaactatctcgtatctcgtcagagttcgaaccatcaaaccaaaagcgcaggaaaatgtctctttaaaacgactctatgctattcgtgtgaaatgtgatgtattagattgcttatgcaataatgtttactatattatttactgactgtttttttttgatttttccaacagcaccgtaagcattatttttattaatcgcctattttaaaacaccggatgacatactatgagtgaagctcttaaggcactgaacaatattcgtacacttcgcgcacaggctcgtgaaacagatctggcaactctggaagagatgctggaaaaactcaccacaatcgttgaagatcgccgtgaggaagaaaattcagcccgtaaagaacaagaagaacgtcaggctaaactggaagccttccgccagaaattgttagaagacggtatcgatcctacagaactactcgcttcagttggttcatcccagcctaaaaccaaatcaactcgtgctcctcgtcctgctaaatacaaatatacagatgaaaacggtaatgagcagacttggacgggtcagggccgtactcctaaagcaatcgccgctgctatcgaagctggtaagacactggaagactttgctatctaaccgctacagcatatccgggcttcactgttctcaagataacaggcccggaaaatattcgattattcatccaagactatcccagtctggcaggttgttaacgacctttcgccaccaatgatacgcagccataagaacaccaaaacaaatacctgcgacgacgcttgagacaaatgcagtgcccggttgtatccctgtatccttccaagtaaaaaaccacatacagatcccccatgccggaccaaaccatccacccatcaacaaagtgatttgccagaatgaggcaaaaggtagcggtggtatcttgagtccagctttccatgcgaggtgtagcaaaggaggggcataattacttcgccacatcctcttgctttccatgatggcaatagcgtgtttctttttagcttcaaagcccataaggttccttccagatccacctttactcatctatctatcgataaaaagccacaatagacaataatgattatcaattccatgtatgtaagtcaaaaataactcaaatagtcattcctttagatcttctggtgaaacccggtcacatgccattttctcaagcattctttgtaatcttttcattttcaacttatgtgcttttttctcaccaatctcctgatagtattcttcacgacgttcgttgaccacgctcctgaattttttcaaaagctgttcaagtgttttgatgtcggtagttgcggcttccacttggatttttttatacatatacatcacatgaaattcatcaatcattttttgctccttggatagaaaaataatatttgttatcagccccaagaaggggccgatagacctcagaacatatcaacatattgattccgccagaaccgtataatgcattttggctaatgcctgcttaacccctttaaaatccacttcagacagttttccagcagcgttctttttccatgcttttttcagaagatgtttctcagcattcctcatcgccagatcgattagcttacaaacaaactcatgatccattacatgcgttataatcatattgctggtcgttttatcctttgagttaaaaagctccgcatagatatgcaaggacacaacataaaagatttcagtgtttttatttttaaatgtattcatttttatttcctctttagtttaatattggaatagcaaaatatttgtatgagcattagcggtatacacacttatagacaatccaaagctgacgaaggtgttgctttaccttacagtggtttacttctccataaatccgattccttttgccttcttctgtgtcatcgtaaaaatgatatcgcgtttttttaatgatactttccataatgtcattcatattgtatttattgttgagaaaataataaaaatcatctggtgcattccgccgtaatccgtccatatagttcctgaaataacattcggcttgttcaataaactcttttatcgtaataagttctatcttcatatttttctccattattgtttagggtaataagatgccctgtgcgaacagatatttgttcgacacgagatcttgtttctttttttatgcagcgttctggcgtgagtgtcgaatagtcacttcaatccattcatcaatctcactttcaacaaaagcgacacacctcggacctatttttactctgtcaggaaagtttccttccttaatacgctcatataaagtcgtgcgactaaatcccactcgatttaaaacatcaggaacgcggataaatcgttttacgctggtttcaatattttctttcattgtctgccctctattattgtaagtaatctctatgagatttcgcttttctctatgttgtttcgacgtgaacaatgatagcgattttgcttatggtaatttagggacgttcaaagaagttttttttgaaaaattcgaaggggcacggatggaaagataacggttaacactggatgcgatcacgttcgcacggagcgaacgtaaccctttttacttggcttattttttcttattcctgtcgtcttctacatgcttttcaacaggggagtctttcaagtgattgttttccatcatgtaatcttcaagcgatttcagatagctcgcatccgtcagaaaagccattgctaacgggtagtccgttgcctttagcattccttcatcacgatcgttgtcgctgtcctcgtgaagcagcgaggaaatcagtgaaagcgggattttaatgccgttatcttctccccagaagatcaggtccatcatcgggataagacgatattcaataatttttctgaatgtgcttttcccaaaacgatactctcttggcgctggagacttcatcttaagctgtctcttccatcgggggatcaacactttcagatgttcaatgatctcttcggttgatgcttcttccagatgaatatcgacagtaatacgtgaaagattattaagggatgtctctttcagatactcggacagaaattcagactggcttaacccagagagttcaggcgtggcttcggttaatgccagcgttttcgcataaaattgcgcgtggcttcgtgtcgtaggatttactgcgtaggttctggcaagctcatgtccaagagtagcggtatcaccactgaaaaagatttcaccgctgaggatcttgttgcggtaatcatccagcattaatcggttaaaggtaggtatggtgttccggctcaacaacattctgtaagccaagatgcgccgctcaacctcaacataaaaatgctgtaaggtgagtttctctatcgcctcatagcgttcaacatcaaaccatgcttccagtgctttcctgatttcacttcttttcatccatcctccaacaatccatttcctttgatatatcttcacaggatccgtttggaacaattgaagttcaactgttttgtcatcagagacgggggaatggctaagttgttgttaagagtgtgaactcgagagcataaaagtggatgcccgacgcgcggcaaaatggtaaaaaacagcatcagtagtaagaaaaattgagcgagagaaaggaattttaatgcagggatttatgcagacaaaatcaaaaatgctttgtaagtgattgattttgttgaatgattggcggagagaggg

SEQ ID NO: 54 - DNA, 32159 bp, Escherichia coli
  misc_feature (10795)..(10795): Unsure
tctgttttcttgcatccttgcgaatctttatctgatgttgattcaacaggttagtgtgaaaactcttctcggtgcattttgattttaccctacgcatcgggaaaaattggtggtcaaatctggggtcaggttagttcgataatggagtgccccccatatatcccttaccgacgcaaaaatccgcaccctcaagccttctgataaaccctttaaagtctccgattctcacggtctgtatctgctggtcaagccgggtggctcccgccactggtatctcaaataccgtattagcggtaaagaatcccgcattgcgctgggtgcctatccagccatctcccagtctgatgcgcgacagcaacgtgaaggtatccgtaaaatgctggcgctgaatatcaacccggtacagcagcgggctgctgaacgtggctcacgaacaccggagaaagtttttaaaaacgtggcgctggcgtggcataaaagtaacaggaaatggtcgcagaacaccgccgaccgtctgcgtgccagtctgaacaatcacatctttccggtcatcgggaacttacctgtatcagaacttaaaccccgtcatttcattgacctgctgaaagggatcgaggaaaaaggtctgctggaggttgcgtcccgcacacggcagcacctgagtaacataatgcgccatgcggtccatcaggagttaatcgatacgaaccctgcagcaaaccttggcggcgtgaccacacctcctgtcagacggcactatcctgccccgccgctggagcggctgcctgaactgcttgaacgtattggggcatatcatcagggccgtgaactgacccggcatgccgttctgctgatgctgcatgtgttcattcgctccagtgaactgcgtttcgcccgctggtcagagattgatttcacaaaccgagtctggacgatacccgcgacgcgagaacccattattggcgtgcgttattccggccgcggggcaaaaatgcgaatgccgcatatcgtccccctctcagaacagtccatcgccattctgaaacagattaaggatatcaccggtaataatgaactgatcttccccggcgaccataacccgtataagccaatgtgtgaaaacacggtcaataaggcactgcgggtgatgggttacgacacgaaaaaggatatctgcggtcacggcttccgggcaatggcatgcagtgcgctgatggaatcgggtttatgggcaaaggacgcagtagaacgccagatgagtcatcaggagcgcaataccgtgcgcatggcttatattcataaggcagagcacctggaagcccgcaaagcgatgatgcagtggtggtcggattatctggaagcatgccgagaatcttatgcaccgccttatacaattggtaaaaataagtttatcccatagtatactaacgaatcccacactctggcaaattaccaccacctccacaggaggtggttctatatagacttttatcaacttcatgacgaaaaacacctattttatcccaaaagaagacaatagagtcacagaggaatcaaagagcgactcaattgtctttggacaatctggttgtgaggttagaaaacagttactcctacaccattaaatagggcgcaatgctcgctaatttctcccgggtttctgtcagttcgcgttccggcgtagattgcgcgatgattcccgcccccgcctgtatccagcagcgctggctatcctgaaatacggaacgcagaactagcgccgcatcaaagcgcgtatcgtccagcagcaggattgcgccggaataaagctctcgcggcgtcttctcaatttgcataatcgcgttcagagcagcatttttagggatacctgaggcggtaatcgacggaaacagcacggtaaacgcatcccaggcatccttgttttccgcaagctgaccgctcacgccagaccccagatgctgaacgctgccgcgctggcgaaccgacattaaatcttcaaccaccacgctgcccggctggcaaacggcctccagttcagcaatagcttctttgacagaaaggatatgctcaagcacctctttactgtcgtgcagcagttctgcctctttcgccttattatgctccgggtttcccatgcgatcgcgggtgcccgcaagcggttcagtgaccactttattgcccgtcactgacatcaccagttccgggctaaagcccagcgcttcgcgtccttcctgacggaacataaacgagcgcacaggcgtgtttgcctgccgcccgtataacagcgtggcgggcatatcaatccgcgatggcaggggaatggcgcgcgagacaatcactttgacatactcgccacggcggatctccgcaacggcgcgcgcaacctgttgtttatatgcctcaccattgagggcggtatccaccgccagtggtgcgttctgcgtcgttgtaccggcctcttttacccactcgcacaaacgtcggcacccgtcggcggagtccgcataaacggtgacatttcccttttcaaaaataagttcttcacggggaacggttaacgtcagcagcggccactccccggcgttaaaggcaatcccccgcgcatgcgccgcaaagttgaacccaacctgtccatatacccgacgtcctttcacctgaggatgcgccataaaacgacgcgcgcagtcggcaatggaatccaccgcccatttttgctccccggcatcatcaataaatgtcgcctgcgttccgtcggcattaatgtgcagccgtgcctggcaccctttgcctaaataccaacagggttgacgctcatagacataacactcttcttctacgaactggcgtaaaacgccagaaatcgtcggtagccattgttcctctggtaacgccagatgtagaaattcactgattttcatcccttacctctctgtgttattcgcggatcaatcaattgcgcttgtcatcagttctcttgccgaatgcagccggatataagcaacccacgccgccagcaacgtgaatgccccggcaaacaggaagcaggccgcatagccaaaatgttgagcaacaacgccaccgataacgcctgccagaatggcgattgccgcatcagtacattgaaagagggtgaagtcgacaccggcctgcaaaggcgatgaaagcgacatcagcgtggcgtaaagacagaccagcgcgcaggccagcgaaatggactggacaatgaccagacactggagaatctgcagcagcagatgacccggcgccatcatgagcgtcatcaccaccgccagcagcgcgatcccctggacgccataagccgtcaacagcgctctgccgggtgaggtgtatttcatcagcaatccgccagccagcgttcctgctatgcccgctgcaatattgccgccgctgaacagcgcgcccaatgcggacatgctcaacccatgatccaacaacagcggtgccagaagaggcagcacaaaccgcatgcctgaattcagcatcaataccagcagtaagcccaggcgcgcctgcttcctccttagcgcataacctaacgccggaacatgcgggatagtcgctgttcgcgtcggctccgtaatgcgccacagcgggagtgacagcgccataatcagcaccgccatcatcagcatggcgacaggccagccggatgccgccgacagcatcaggaacaccccgccgccgcacatcattcccagatagctgccgccgacctgcacgctgtttccccagccgtaacccgtgcgggtcagttgatcgacacaaaagccgtcgctggcgatatcaatggtggaggcgaccgtgcctgccaccataaacagaacaaataacgcgacgatttgcgtatcggggaatcccccttctcgcccaaaccagccaatcgctgcggcaatagtcaggatcgccgctagcgcgacctgaccacgcaggattaacatgcgggaacggcgttcctggctaccgggcggaagccgccagcgctcgatccacggcgcccaaataaacttcagcgcccagggcagcataaacagggttgtcgcaccggcaagcgccagcgaaccgccagcagcgcgcaccagcgcgggtaaggactgcatagacagcgccgataccagactctgcgtcacatagacgccggcaatagcaaaaatcacccgcccggtcgtcaacgtcagcggtttcacattcgactgaacatcactcatgcacccactctccagacgcggaacccccgtcgtcgcgccacacgcgcgcggccatttgcgcctgccacagcgcctgataacgcccatgatgtgagagcaattgcgcatgagtaccctgctcaaccacctgtccctcttccatcaccagaatgtttccggccccggcgatggtggataaacggtgagcgatgataatcaccgtccggttgtaaaccaggttatcgatcgctttttgcaccgccagctcgctttcaatatccagcgcggcagtcggttcatcgagaatgacgaccggcgcgtttttcaataacgctctggcaatggaaatccgctggcgctcgccgcccgatagctggccgcccatctctcccattggcgtcagccagccttgcggaagacgggaaataaactcaaggcactgcgccgcgcgggcggcctcttctacctcctgccgcgtcgcctgtgggcgcgcgatacggatattcgccagcagcgtgtcatcaaacagccagacatcctggaaaacaacagaaatcaggctattgagctgttccggcgtcaggcggcgaatatcgacgccgccaatagaaatctgcccttgctgcggatcggcatagcgcattaacagtttggtgaccgtagttttgcctgcgccggaggcacccaccagcgcgctcatactggctgccgggaacgtcaaagaaacatgattaagcgcgtggccgtcaccttcttcgtagcgatagctgacgttgtcaaagcggatatcgtaacgttccggcatctcgctttgctctgcgacgggaagcggtgctatcgccataaactgctcaatccgttgcagggcgctggcgatcagttccacaaccgaggtgtagctgataaacatcgccatcggttctgcgaagcgcataatcatcgcgacggcggcaatcaaaaaggcgaggttcagagtgcccgtcactacccagacgatcccggataacaccaccacctgtaggcccaactccacgacgctggcgatcagcatcgtcgcgccagcgccctgacggtgagtgcgggtctgtaagttttccagcgcattgaaatgcgccagcagcgcccggcttttatcggcatcgctgccgcaggtgcgcaataccatcatcccctgagcaaattcaacgatatcgccgctcagacgctggtgcgcttcccccagcgtctgcatttgtcgccgcatcgccgggcggcgccagtaataaaacggcaccagcagagggaagatcagcaacatcaccagccccagccgccagtctatccacaatgtcgccagcgacgccgtcagcggcgtgacaatggtgagcagcaaaatattggctatcgcaataacataattgaggttttcatccacgctgcccagcagcaaggcgttcatttcacccgccctgccgcgctggagcttctccagcggcacgcggcgtaactgctcgccaagtcgcaggcgcaactcatgggtagcctgcgccagatgaccacggtattcaaagcccaggccataccagcgtagcaccagcgtcacaattgcggcgacgctgaaggccatagcccagttaagaagttgcggcgcgtctccccgtaacagcgcatcaatgatcggataaagacaggcaaaggcgatcccctgcatgaatgccgccagcaacagcgccagcatactgcgtcgcagcatcctggcctgactgccaacgctggagataagctggcgccagatgacgcgccaggccaggttatccgcaggattattgtctttcattttccaccacctcttcctgtgttccacccggcacccaatgctgcgcctgctgatagtgttgccagagccgttgatacaggccgccctgcgccaacagttgcgtatggttccccatttccctgagctgtccgtcggaaaacagcaatatcacatcggcctgagtcaccattgagagacgatgcgcgaccatgatgaccgtccggccacgcatggccgccgcgagcgccttgataagcgccgcttcgttttccgggtcagcaaacgccgtcgcctcatcgagcaccaggatggggcgatcctgcaaaagcgcccgggcgatagtaatgcgctgccgctggccgccggagagaaataccccacgttccccgactcgagtgttgtaaccttctggcagagcgctaataaaatcatgggcctgcgccactctggccgccgctataaccgcctccagcggcgtatccggcgcgcccagacgaatgttattggctatcgtgtcggcaaaaaggaagttgtcctgaaacacaaacgagagttgcttcatcagggtgtccgtctgcatatcacgcagatccacgccgccaatacggatatggcctttgtccgggtcggcgtaacgcagcagcaagcgcgccacggtgctttttccggcgccgcttggcccgaccagcgccacaatttgcccggcaggcacatgaaagctcacctcctgcaacgcggcgccagtacgcgcttgcggataatgaaagctcacctgctcaaaggtaatgctcgcctcttgcggctgctggtcagactgcggcagcgataactccggcatcgcgagaacctgataaatacgctgaatgcttaaacgcgtttgcgcgaccaggttattgagcatcatcattggcattacggcttcggccattccgctgcccagcagtaaaacggccacccacgcgataaaatcgaaactgccatagtgcaacaggccgtatcccgaccagatcaggacaaacagggtcgggagaggattcagaatcgagaaggaaaaacgcgctgaaaaaccggctttgcgataccaggttttgagcacatcgacccactcttcaagggcgcgttgatagcgcaaaaaactggtgctgccgctatcaaacgttctcaccacgggcatggcctgcacgaactcaataaccgccgcgctaacctgctcgcgcgccttatgataacgctgagccatatcttccgaacgctggcgggcgagcacgagaacaaccgatccaaacgccagtacccccagcgtcgcgattgccagccgccagtccagccagaacaagataacgattgtcgccagcggcatgatgatcgcgcgggcatagagcggcgtgctgtcggccacaaaaatatgtaacgacttcacgtcatccagcatcactttcgccactgacccgctgcccatttgctgtaacacgccaggcggaagctgcaatgctttacgggctaacctgctgcgcagaatgttctccagatgaaaagccgcgtaatgagaggtgttgaacgcctgtaagcgcagaacaaaagttaagaccacgcagccgatcacgccgcccagcggccaggccggaatagcgtcaggcgtcgcgcgaatgtcacgcaggctccacgccagaaaaaggagcgcccccaggctggttaatgccgccagccccgccagcgccatagctaaaataaccttcctgcgaaccggtgtaatcacctgccagagaggaaatcgggacagcgattcagtattggatgattgagatgacatgggagtaactgaatttcctgatgaatttttacggacgccaaaaacgacaattcagggtggcgttctgagaattaatgtgaataataaccattatcaataactcatctaccccattcggttctatttatacccgcattggtctaagccacagggagataaccaggtcatgatggagtcaccgcaaacgcaatctgaaatctctattcaccagttggtggtcgggaaacctgcaaacgatggcaatattcctgctcagtgtgaactgctgcgctgttcgttgcaggaaggtatggatattttgctctggaggggccattttgcgcggcctgagacgttgcagctacacgacgatctgggcaggattaacttctcgtgcatcctggaaggcacatcgcgctttgcgattcagggactccggcgccacaccgactgggagcttgcgcgcaatcgccattacattacccatacgccagactgtcgcggcagcgcctcctattgtggccgattcgagagcattaccctctccttcagccctgaaaccctcgcgctgtgggtgccggatattagcgcggtcattaagaataagatcgactcccactgctgttgccagcagcagcgttgtaatgctgaaacccacttaacggctcaggccttgcgtcacgcgctgatgcgcatgcacggcggcttcagtcatgaacaaaagccgtcgacgctatggttgcaggggcaaagtctggtcatgctcagtctggtgctggatgaacatcgcgaagacgccagttgcctctcctgccacttcaacccgatggaacgccagaaactgctgcgggcgaaggatctgctgctggctgatctgacgcaagcgccgggcgtcgcggagttggccagagagtccggtctgagcgttctcaaaattaagcgaggcttcccgcgttctgttcaacaacagcgtctatggcctgtttcaggctgaacgaatgcaggaagccagaagacgcctggccaacgggcaatacctccgtcatgacggtggcggccgatctgggctatgccaacgccagccatttctctgccgccttccagaaacagtttggcgtaactccttcgacctttaaacgcgggatgtaaccggggtcgcgcccccctaaactcctccctgacagaggcccggataccccatccgggcctctgttctttccgcctgttaccaacccgaaacgggcataaataaacccgtttcgggtagcatccaattgttaataattattattctcatatgagtaatgcttttcggtaagacgtgccatcaggaggaagaatgatttctggcgcaccatctcaggattcgctgttaccggacaaccgccacgcggctgattaccaacaattacgcgagcggctcatacaggaactgaatttaacgccgcagcagttacatgaagagagcaacctgatccaggccggcctggattccataagattgatgagatggttacactggtttcgtaaaaatggctaccgccttacccttcgcgagctgtatgccgcccccacgctggcggcatggaaccagttaatgctcagccggtcgccggagaacgcggaagaagaaacgccgcccgacgaatcatcctggccgaacatgaccgaaagtacccccttcccattgacgccagtacagcacgcctacctgacgggccgcatgccggggcagacgcttggcggcgtgggttgccacctgtatcaggagtttgaaggccattgtctgacggcgtcgcagctggagcaggccatcacgaccttgctgcaacgccacccaatgctgcatatcgcctttcgccccgacgggcagcaggtctggctaccgcaaccttactggaacggcgtcaccgttcatgatttacgccataacgacgctgaaagccgccaggcctatctggacgcactgcgccagcgcctgagccaccgtcttttacgcgtggaaatcggcgaaacgtttgattttcagctgacgctcttgccggacaatcgccaccgcctccatgtcaatattgacctgctgattatggatgcctccagctttacgcttttcttcgatgagcttaacgccctgctggccggagaatcgctgccggctatcgacacccgctatgatttccgctcgtatttgctgcaccaacagaagatcaatcaaccactgagagacgacgcgcgcgcttactggctggcgaaagcatcgacgcttccccccgcgcccgtcttgccgctggcctgcgaacccgccacgctatgtgaagtccgtaatacccgacgccgcatgattgttccggcaacacgctggcacgcctttagcaaccgggccggcgagtatggcgtgacgccgacaatggcgctggcgacctgtttttctgccgtgctggctcgctggggcggcctgacgcgtctgctgcttaacatcaccttattcgaccgccagccgctgcacccggcggttggcgcgatgcttgccgacttcaccaatattcttctgctggacaccgcctgcgatggcgataccgtcagcaacctggcgcgtaaaaaccagctcacgtttacggaggactgggagcatcgccactggtccggcgtcgaattactccgtgaactcaaacgccagcagcgctacccccacggcgccccggtggtatttaccagcaatctggggcgttccctctacagcagccgcgcagaatcgccgttgggcgagccggaatggggcatctcgcaaacgccgcaggtctggatagatcatctggcgttcgagcatcacggcgaggtctggctacaatgggacagcaacgacgcgctgttccctccggcgttagtcgaaacattgttcgacgcctactgccagttgattaaccaactctgcgatgacgaaagcgcctggcaaaagccgttcgcagatattatgcccgccagccagcgcgcgatacgcgaacgggntcaackccaccgggtgcccccattcccgaaggcttgctgcatgaaggcattttccgtatcgctctgcaacagccgcaggcgctggcggtaacggacatgcgttatcagtggaattatcatgagctgacagactatgcccgccgttgcgcgggcaggttaatcgagtgcggggttcagcccggcgataatgtggctatcacgatgtcgaaaggcgcaggacaacttgttgcggttctggccgtcctgctggccggggcggtttacgttccggtttcgctggatcagcctgccgcacggcgcgagaaaatctacgctgacgccagcgtccggctggtgctcatttgtcagcacgacgccagcgccgggtcagacgatattcccgcccttgcctggcagcaggccattgaggcggagccgatcgccaacccggtagtacgcgcccccacgcaaccggcctacattatctacacctccggctctaccggtacgccgaaaggggtagtcatttctcaccggggagcgcttaacacctgttgcgatatcaatacccgctatcaggttggcccgcatgacagggtgctggccctctccgccctacattttgatttatcggtttacgacatttttggcgtactgcgcgcgggcggcgcgctggtgatggtgatggaaaatcaacggcgcgatcctcacgcatggtgtgagctgatccagcgccatcaggtcacgctctggaacagcgtcccggcgctgttcgatatgctgctgacctggtgtgaaggtttcgccgacgccacgccggaaaacctgcgcgcagtgatgctttccggcgactggatcgggcttgacctccccgcccgttatcgggccttccggccacaaggacaatttatcgcgatgggcggcgccaccgaggcgtctatctggtctaacgcctgcgaaattcacgacgtccccgcccactggcgctccatcccttacggttttccgctaaccaaccaacgctaccgggtggtggatgaacagggccgggactgccctgactgggtgccgggtgaattatggattggcggcattggggtcgcggaaggctatttcaacgatcccctgcgtagcgagcagcaatttttgacgctcccggacgagcgctggtatcgcaccggcgatctcggctgctactggccagatggcacaatcgagttcctcggtcgtcgcgacaagcaggtcaaagtcggaggatatcgcatcgagctgggcgaaatcgaaagcgcgctcagccagctggcgggggtgaaacaagcaaccgttctggcgatcggcgaaaaagaaaaaacgctggcggcatacgttgttcctcagggcgaggctttttgcgttaccgatcatcggaacccggcactgccgcaggcgtggcacacgcttgcgggaacgttgccctgttgcgccatctcgccagagatctccgcagaacaggtagccgatttccttcagcatcgcctgctaaaactgaagccgggtcacaccgctggcgccgatcctctccccctgatgaactcactcgctatccagccgcgctggcaggccgtggtggaacgctggttagcatttctggtgacacaacggcgactgaagcccgctgctgaaggttatcaggtctgcgctggtgaagaacgcgaggatgagcacccgcacttcagcggacatgatttaacgttatcgcaaattcttcgcggtgcccgtaacgaactgtcgttactgaacgacgcgcagtggtccccggaaagcctggcctttaaccatccggccagcgccccgtatattcaggaactggcgacaatttgccaacagcttgcacagcgcttacagcgcccggtacgcctgcttgaggtgggaacccgcactggccgcgccgcagaatcgctgttagcacagctcaacgccggacagattgagtatgtcgggcttgagcagagccaggagatgctgctgagcgcccggcagaggctcgccccctggcctggcgcccgtctgtccctctggaatgcagacacgctggcggcgcacgctcactcggcggacattatctggcttaataacgccctgcatcgtctgctgccggaagatcccgggctccttgcgacattacaacagcttgccgttcccggcgcgctgctctacgtgatggagtttcgccagttaacgccgtccgccctactcagcacgctcctgttaaccaatgggcagccggaggccttgctgcataacagcgccgactgggcggcattatttagcgcggccggcttcaactgtcagcatggcgatgaggtcgcggggttacaacgcttcctcgtacaatgtcctgacaggcaggtgcgccgcgatccccgtcaacttcaggccgccctcgccgggcgtctgccggggtggatggtgccgcaacggatcgtcttcctcgacgccttaccgctgacggctaacgggaaaattgactaccaggcgctgaagcgtcgtcatacccctgaagcggaaaacccggccgaagcggatttaccccagggcgacattgaaaataaatatcctccggcatagccggaggtttttcaaatgcgcctataaggctctcttaccagccgcgccctaacaggcgcacacgatctgmcatttgcatccaacttcgttacttacggcccgtaaacgggctgcccggatagggaatcgataactgctctcccattttatcctcttcaagctggtgctttatgtaatcctgtatcttcgccgtgttcttacccaccgtatcgacgtaataccctctgcaccagaactccctgttcctgtatttgaatttcaaatcaccaaactgctcgtaaggcatcagactgcttttccctttcagatatcccataaagcctgatacgctcattttgggcgggatctccacaagcatatggatatgatctgcmcagcattcagcttccagaatccgtacacttttccactcacacagctttctcaaaatacagcctattgcatctacgctkactctstgwaasaacacctgtcttcrgyatwttggcgcawatactmtgtgatatttacagwkccatcgggtgtgctgcataagctctttkcgttccccattgggacccccttttgatttcttgtttgacacttgcagttgccagaccgcaaggtgttttaacaaatcaaaaggggttttaataactggctcaaagctgaaagctttccggaacccccagcctagctgggggttttctgtgcacaaacaggttgccgccctctggcagcaactcttatcaactggcaatgtcaccagagaaaccgacttcttccagcaaggcggcgatagcctgctggcgacccgtctgaccgggcaacttcatcaggcaggttatgaagcgcaattaagcgacctgtttaatcatccccggctggcggattttgccgccacgctgcggaaaaccgacgtcccggtcgaacaaccattcgtccactcccctgaagatcgctaccagccctttgcgcttaccgacgtgcagcaggcttacctggtggggcgtcagccgggctttgccctgggcggcgtcggctcacatttctttgttgaatttgaaattgccgatctggatctcacccggttggagacggtctggaaccgattaatcgcccgccacgatatgctacgcgccgtcgtgcgtgatggacagcaacaggtgctcgaacagacgcctcgctgggtaatacccgcacacatcctccatacgcctgaagaggcgttgcaggtgcgcgaaaaactggcccatcaggtactcaaccccgaagtctggccggtattcgatctccaggtcggttacgttgacgggatgcccgcccgcctgtggctgtgtctggataacctgttacttgacgggctgagcatgcagattctgttggcggagctggaacatggctaccaatatccgcaacagttgcctccgccgctacccgtcacctacagggattacctgcaacaacccgcgatccagtcgcttaacgcagattctctggcatggtggcaggcgcaacttgatgatattcctccggctcctgcattgccgctacgttgcatgcctcaggacgtcgaaacaccgcgcttcgcccgcctgaacggcgcgctggacagcacgcgctggcatcggctgaaaaaacgggcggctgacgcccatctcaccccgtcggccgtactgttgtcggtgtggtcaacggttctctctgcatggagtgcacagcctgagttcacgcttaaccttacgcttttcgacaggcgaccgctgcacccgcaaatcaaccagattctgggcgatttcacctcgctgatgctgctgagctggcatcccggcgaaagctggctgcacagcgcgcagtcactacagcagcggctgagccagaacctcaaccaccgcgatgtgtcagccatccgcgtgatgcgtcaactggcgcaacggcaaaacgtgcctgccgttccgatgcccgtcgtctttaccagcgcgctgggctttgagcaggataacttcctcgcccggcgtaatctgctcaaaccggtctggggcatctcccagacgccgcaggtctggctcgatcaccaggtttatgaatccgaaggcgaactgcgctttaactgggattttgtcgccgcgctgtttcctgccgggcaggtggaacgtcagtttgagcagtattgcaccttgctaaaccgaatgaccgaggatgaaaacagctggcatttgccactcgccgcgctggtgcctcccgttaagcaggcggagcaaggtacagagcgcacatcgcgcgtatgccctgagcactctcagtcacacattgcggcggacgagagcaccgtcagcctgatttgcgacgccttccgcgaggtggttggcgagtctgtcacgcccgcacaaaacttctttgaggcgggcgcaacgtcgctgaatctggtgcaactgcacgttttgttacaacgtcacgaattttcgactctgacgttacttgacctctttacccacccttctcctgcagccctggccgcttatctgaccagtgtcgccacggtggagaaaaccaaacgctctcgccctgttcgccgtcgtcagcggcggatatagcgcgaagcaaactgattttccccggaacgccatcgcgaacgcatggcgttccattgactttatgaaccttaggaaatgggaccgattatggataacttgcgcttctcttctgcgccaacagcagattccattgatgcatcgatcgttcaacactacccggactgcgaacctgtcgcggttatcggctacgcctgccattttcctgaatcgccggatggcgaaacgttctggcaaaatctgctggaaggtcgtgaatgcagccgacgctttacgcgcgaagagcttctggccgtcggtctggatgccgccatcattgacgatcctcattatgtcaatatcggtacggtgttagacaacgccgactgcttcgacgccaccctgtttggctattcgcgacaggaagcggagtcgatggacccgcagcagcgcctgtttttgcaggcggtctggcatgcgctggaacatgccggttatgcccccggcgccgtcccccataagaccggcgttttcgcctcttcccggatgagtacctaccccggtcgcgaagcattgaacgtgacagaagtcgcgcaggtaaaaggtctgcaatctctgatgggcaatgataaagactatattgccacccgcgccgcgtacaaactcaacctgcacggcccggcgttatcggtacagaccgcctgctccagctcgctggttgccgtgcatctggcctgtgaaagcctgcgcgctggcgaatccgatatggcggttgccggcggcgtggcgctctctttcccccagcaggcaggctaccgctaccagcccggaatgattttctctcctgatggtcactgtcgtccctttgacgcctcggctgagggcacctgggccggtaacggtctcggctgcgtggtgctgcgtcgcctgagagacgcgctgctgtcaggcgatccgattatctcggtgatcctctccagcgcggtcaacaacgacggcaacagaaaggtcggctataccgccccttccgtcgcagggcaacaggcagtcatcgaagaggcgttaatgctggcggccatcgacgacaggcaggtaggttacattgaaacccacggcaccggcacaccgctgggcgacgcgattgaaattgaagcgttacgcaacgtctatgcgcctcgcccgcaggatcagcgctgtgcgctcggttccgtgaaaagtaacatgggccatctggataccgcggcgggcattgccggactgctgaaaaccgttctggcagtcagtcgcgggcaaattcctcccttactgaattttcacacccccaacccggcgctgaaacttgaagagagcccctttaccataccggtgtcggcacaggcatggcaggacgaaatgcgctatgcgggcgtctcctcctttggtattggcggcaccaactgccatatgatcgtcgcctcgctgcccgacgcgctcaacgcgcgcctccccaatacggatagcggcagaaaaagtaccgcgctgctgctcagcgccgccagcgacagcgcgttgcggcggctggcgacggattatgccggggcgctgagagagaatgcggatgccagctctctggccttcacagccctgcacgcgcgccgtctcgatctccccttccgcctggcggcgccattaaaccgtgaaaccgccgaggcgctcagcgcctgggccggtgagaaatcgggggcgcaggtttacagcggccacggcgccagcggcaagcaggtgtggctgtttaccggccagggctcgcactggcgcactatgggtcaaacgatgtaccagcactcaacggcgtttgccgacacgctggatcgctgtttttccgcctgtagcgaaatgctcacgccgtcactgcgcgaagcgatgtttaaccccgattcggcgcagctggacaatatggcctgggcgcagccggcgattgtcgcgtttgaaatcgcgatggcggcgcactggcgtgctgaaggactgaagccagacttcgccattgggcattccgtcggtgaatttgccgctgccgttgtctgcggacactatacgattgaacaggtcatgccactggtttgtcggcgcggcgcgctaatgcagcagtgcgcaagcggcgcgatggtggcggtatttgcagacgaagacacgctgatgccgctggctcgccagtttgagctggatctcgccgccaacaacggtacgcaacatacggtattttccgggccggaagcccgtctccgcggtattttgcgccacgctctcgcagcatgacattaactatcgtcgcctgagcgtaaccggtgcggcgcactccgctttactggagccgatactcgatcggttccaggacgcctgcgcgggactgcacgcggagccggggcaaataccgattatttccacgctcaccgccgacgtcattgatgagtcaacgctcaaccaggcggattactggcgccgacacatgcgccagccggtgcgttttatccagagtattcaggtggcgcatcaactcggcacccgcgtttttctggagatggggcccgatgcccagttggttgcttgcgggcagcgcgaataccgcgataacgcatactggatagccagcgcccggcgtaacaaagaggcgagcgttgtcctcaatcaggccctgctccagctttacgctgccggcgtcgctctaccgtgggccgacctactggcgggcgatggacaacgtatcgctgcgccatgttatccgtttgatactgagcgttactggaaagagcgcgtctccccggcctgcgagcctgccgacgcagcgctgtctgccgggctggaggtggcgagtcgcgccgcgacagcgctcgatctccctcgcctggaagcgcttaaacagtgcgccacgcgactgcacgccatctacgtcgatcaactggtacaacgctgtaccggcgatgccattgagaacggcgtggacgccatgaccatcatgcgccgtggacgtctgctgccccgctaccagcagctactccagcgcctgctgaataactgcgtggtcgacggcgattaccgctgcaccgacgggcgatacgtccgcgcccgccccattgaacatcaacagcgggaatcactgctgacggaacttgccggttattgtgaaggttttcaggctattcccgacaccatcgcccgtgccggcgatcggttatatgaaatgatgagcggcgcggaagaaccggtggcgattatcttcccgcaaagcgcctccgacggcgtggaagtgctgtatcaggaattcagctttggccgctatttcaaccaaatcgccgccggggtattacgtggcattgtccagacgcgtcagccccgccagccgttgcgtattcttgaagttggcggcggaaccggcggcaccaccgcgtggctgctgccggaactcaacggcgttccggcactggagtaccatttcaccgatatctcggcgctgttcacccgtcgcgcccagcagaaattcgccgactatgattttgtgaagtatagcgagctggatctcgaaaaagaggcgcagtctcagggtttccaggcacagtcttacgatcttatcgtggcagcgaacgtgattcacgccacccgccatattggccgcacgctcgataatctgcgccccctgctcaagccgggcgggcgcctgctgatgcgcgaaatcacccagccaatgcgtctgtttgacttcgttttcggcccgctggttcttccgctacaggatctcgacgcccgcgaaggtgagttattcctcaccaccgctcagtggcaacaacagtgccgccacgccggattcagcaaagtggcgtggctaccgcaggatggcagcccgaccgccgggatgagcgaacatatcattctcgccacgctgcccggtcaggcggttagcgccgtaacattcaccgcgccatcagaacccgtgttggggcaggcgctgacggataacggtgattatctcgccgactggtctgattgcgcaggtcagcccgaacggtttaacgcccgctggcaggaggcctggcgtctgctttcacagcgtcatggcgacgctctgcctgtggaaccgccccccgtcgccgccccggagtggctagggaaggttcgcttaagctggcaaaacgaagccttttcccgcggtcagatgcgcgttgaagcccgtcatcctgctggcgagtggctgccgctatcgcccgccgagcctcttcctgcgccgcaaacgcattatcaatggcgctggacgcccctcaacgtcgccagcattgaccatccgcttacctttagcttcagcgccggtacgcttgcgcgcagcgacgagctggcgcaatacggcatcattcacgatccgcacgcctcttcacgactgatgattgttgaggagagcgaggatacgctggccttagcggagaaagtgatagcagcgctcaccgccagcgcagccggattgattgtggttactcgccgcgcgtggcgagtcgaggaaaatgaagcactctctgcatcccatcacgcgctatgggccttgcttcgcgtcgcggccaacgaacagccggaacggttgcttgccgccatcgatctcgccgaaaacaccccgtgggaaacgctgcatcaagggttgagcgcagtctcactatcacagcgctggctcgccgcacggggtgacaccctttggcttccttcactgtcgcccaatacgggatgcgccgctgaattaccggcaaacgtgtttaccggcgatagccgctggcatctggtgaccggagcgtttggcggattaggccgccttsccgtgaactggctcagagaaaaaggggcgcgacgcatcgccctgctagcrccgcgcgtggatgagtcatggctacgcgacgtggagggcgggcagacgcgcgtctgccgttgtgatgtgggcgatgccgggcaactggccacggttcttgacgatctggcggccaacggcggcattgccggagcgattcatgccgctggcgtattggctgacgcgcccttgcaggagcttgatgaccaccagctggctgccgttttcgggtaaaagccagcggaaccagctgttgcaaaccctgcgcaaccacgacggacgctatcttattctctactcttccgctgccgccaccctcggcgcgccgggtcagagcgcccatgcgctggcctgcggctacctggacgggctggcccagcagttttccacccttgatgcgccgaaaacgctctctgtcgcctggggcgcatggggagaaagcggtcgggcggccacgccggaaatgctggcgacgctcgccagccgaggtatgggcgcgttaagcgatgccgaaggctgctggcacctggaacaggcggtgatgcgcggtgccccgtggcgactggcgatgcgcgtttttaccgacaaaatgcccccgttacaacaggctctgtttaacatcagcgccacagaaaaagccgcaacgccggtcattcctcctgctgatgacaacgcctttaacggcagcctgagcgatgaaacagcggtgatggcatggctgaaaaagcggattgcggttcagctaaggctgagcgatccggcgtcactgcatccaaaccaggatctgttgcaactcggcatggactcgctgctcttccttgaactcagtagcgatattcagcactacctgggcgtacgcatcaatgcggaacgggcgtggcaggatctgtctcctcatggactcacgcagcttatctgttctaagccagaggcgacgcctgccgcttcgcagccggaagtgttgcggcacgacgccgacgagcgttatgcgcccttccctttgacgcccattcagcacgcctactggctggggcgaacccacctcattggctatggcggcgtcgcctgtcacgtcctgtttgagtgggataaacgccacgatgagttcgatctcgccatactggagaaagcatggaaccagctcatcgcacgccacgatatgttgcgtatggtggttgatgccgacgggcagcagcgaatcctggcgacaacgccggagtatcacatcccgcgtgacgatctgcgcgcgctttccccggaagaacagcgcatcgcgctggaaaaacggcggcatgaactgagctatcgcgttttgcctgccgaccagtggcctctttttgagctggtggtcagcgaaatcgacgattgccattaccgtctgcatatgaacctcgaccttttgcagtttgatgtgcagagttttaaagtcatgatggacgacctggcgcaggtctggcgcggtgaaacgctggcgccgctcgctattaccttccgtgattatgtgatggctgaacaggcgcgccgacagacatcggcatggcacgatgcctgggattactggcaggaaaaactgccgcaactgcccttagcgccagagctgccggtggttgagacgcccccggaaacgccacacttcaccaccttcaaatcgacgatcggcaagacagaatggcaggccgtgaaacagcgctggcagcagcaaggcgtcacaccgtctgccgcgctgctcacgctgtttgccgccacccttgagcgctggagccgtaccacaacatttacgctgaacctgacgttcttcaatcgccagccgatccatccgcaaatcaaccagttgattggtgattttacctccgtcacgctggttgattttaacttctcagcgccggtgacgttgcaagagcagatgcaacagacccaacagcgcctctggcaaaacatggcgcacagtgaaatgaacggtgttgaggtgatccgtgagctgggccgcctgcgcggatcacaacgtcaaccgctgatgccggtagtgtttaccagtatgctggggatgacgctggaaggcatgactatcgatcaggcgatgagccatctgttcggcgaaccctgctatgtattcacgcaaacgccgcaggtctggctggatcatcaggtcatggagagcgacggcgagttgatgtttagctggtactgcatggacaacgtgctggaacccggcgctgccgaggcgatgtttaatgactattgcgccatcctgcaagccgtcatcgccgcccctgaaagcctgaagactctcgccagcggcatcgccgggcacattccccgccgacgctggccgctgaacgcgcaggcggactacgacctgcgggatattgagcaggcgacgctcgaataccccggcatccggcaggccagagcggaaataaccgaacagggcgcgttgacgctggatatcgtgatggccgacgatccgtcgccatcagcggcgatgcctgatgagcacgaacttacccaactggcgctgccgttgcctgagcaggcgcagcttgatgagctggaggcgacctggcgctggctggaggcgcgtgcgctacaggggatcgcggctacgctaaatcgtcacggcctgtttaccacgccggagatcgcccatcgctttagcgcaatagtacaggcgctgtccgcgcaagcgtctcaccagcgtctgctgcgccagtggctacagtgtctgacggaaagagagtggttaatccgcgaaggtgaaagctggcgctgccgcattccgctcagcgagattcctgagcctcaggaagcgtgcccgcaaagccaatggagccaggcgctggcgcagtatctggaaacctgcatcgcccggcacgacgccctcttctccgggcagtgttctccgctggaattgctgttcaacgagcagcatcgcgttaccgacgcgctgtatcgcgacaaccccgccagcgcctgtctgaatcgctataccgcgcagattgccgccttgtgcagcgcagaacggattctggaggttggcgccggaaccgcagccactaccgcgccggtgctgaaggccacgcggaacacgcggcagtcgtaccacttcacggacgtctccgcgcagttcctcaatgacgccagagcccgtttccatgatgaatcgcaggtgtcttatgccttgttcgacatcaaccagccgctggatttcaccgcccacccggaggcgggttacgacctgatcgttgccgtcaatgtgctccacgacgccagccatgtcgtccagacgttgcgcagattaaaactgttgctgaaagccggcggacgtttgctgatcgttgaagcgacggagcgaaacagcgtattccagctggcgagcgtgggctttattgagggattaagcggataccgcgatttccgccgccgggatgagaaaccgatgctcacccgctccgcatggcaggaggttctcgttcaggccgggtttgcaaacgagctggcgtggcccgcgcaggaatcgtcgccgctgcgccagcatctgctggtagcgcgttcgcctggcgtaaatcgcccggataaaaaagccgtgagccgctatttacagcagcgctttggcaccggtctgcccattttacagatccggcaaagagaagcgttatttacgccgctgcatgccccgtctgatgcgccgactgagccagccaaacccacgccagttgccggggggaatccggcgctggaaaaacaggtggctgaactctggcaatcgctgctgtctcgccccgtggcaaggcatcacgactttttcgaactgggcggcgacagcctgatggcgacaaggatggtcgcgcagctaaaccggagagggattgccagggctaaccttcaggatctgttcagccattcgacgctgagcgacttctgcgcccatctacaggcggctacgtcaggagaggacaacccgatacccctttgccagggcgacggtgaggaaaccctgtttgtcttccacgcttcagacggcgatatcagcgcctggctgccgctcgctagcgcgttgaacaggcgcgttttcggcctgcaagcaaaatcgccgcagcgctttgccacgctcgaccagatgatcgatgagtatgtcgggtgcatccgtcgtcagcagcctcacggcccttatgtgctggcgggttggtcgtatggcgcgtttcttgcggcgggcgccgcacagcgcctgtacgccaaaggcgagcaggttcggatggtgttaatcgatcccgtgtgccgacaggatttctgttgcgaaaaccgggcggccctgctgcgcctgttagccgaaggacaaacgcctctggcactgcccgaacatttcgaccagcagacgcccgacagccagcttgccgactttatcagcctcgctaaaacggccggtatggtgtcgcaaaacctgacgctgcaagcggcagaaacgtggctcgacaacatcgcgcatctgctgcgtttactgactgagcatacgccgggcgaaagcgttccggtcccctgtctcatggtgtatgccgccgggagacccgcgcgctggacgccagcagaaaccgagtggcagggctggataaacaacgccgacgacgctgtgattgaagccagccactggcaaatcatgatggaagccccccacgttcaggcttgtgcgcaacacattacgcgctggctttgcgcaacctcaacgcaaccggagaacacgttatgatgccgtccgcctccccaaaacaacgcgtactgattgtgggcgccaaatttggcgaaatgtacctgaatgcctttatgcagcccccggaggggctggaactggtcggcctgctggcgcagggaagcgcccgttcaagagagctggctcatgcgtttggcattccgctgtatacctcgccggaacagataaccaggatgccggatatcgcctgtattgtcgtgcgttcgaccgtcgccggaggaaccggtacgcagcttgccagacactttctgacgcgcggcgtacacgtcattcaggagcatcccctccacccggatgacatcagttccttacaaacgctggcgcaggaacagggctgctgctattgggtaaacacgttttatccgcatacgcgcgcgggacgcacatggcttcgcgatgcgcagcagctgcgtcgctgcctggctaagacgccgccggtagtccacgccaccaccagccgacagttgctctactccactctggatttgttgttgctggctctgggcgttgatgccgccgccgtggagtgcgacgtggttggcagctttagcgattttcactgtctgagactcttctggccggagggagaagcctgcctgctgcttcagcgctatctcgatcctgacgatccagatatgcatagccttatcatgcaccgcctgctgctgggctggccggaaggtcatctttcgctggaggcgagctacggccccgtcatctggtcatccagcctgtttgtcgcagaccatcaggagaacgcccacagcctctaccgcagaccggagatcctgcgcgatctgccgggtctgacgcgcagcgcggcgcccctgagctggcgcgactgctgcgaaaccgccgggccggagggcgtcagctggttgctacaccagttgcgcagccatctggcgggcgaacatccaccagcggcctgccaaagcgtacatcagatcgcgttatcacgtttatggcagcagattttacgtaagaccggcaatgcggagatcagacgcctgacgccgccgcaccacgaccggttagccggtttctacaacgatgatgataaggaggcgctgtgacgcaatctgcaatgtgcatcccgctgtggcccgcccggaacggcaatactgcgcatctggtcatgtgccctttcgctggcggcagcagtagcgcgtttcgccactggcaagctgagcaactggctgattgcgcgctttctctggtgacctggccggggcgcgatcgccttcgccatctggaaccgctcagaagcattacacaactggcggcactgctggcgaacgagctggaagcatccgtatcgcctgacacgccgcttttactcgccgggcacagcatgggggcgcaggtggcgtttgaaacctgccgacttctggagcaacgggggcttgcgccacaaggactgattatttccgggtgccatgccccgcatctgcattctgaacgccagctcagccatcgcgatgatgccgactttatcgctgagctgatagacattggcggatgttctcctgaactgcgggaaaaccaggaattaatgtcgctgtttcttcctcttctgcgcgctgatttttacgccaccgagagctatcactacgactcgcccgacgtctgtccgccgctgcgcacgcctgcgctgttattgtgcggcagccacgatcgcgaagcctcctggcagcaggtcgatgcctggcgtcagtggctgagccacgttacaggcccggtggtgattgacggcgatcatttctatcccattcaacaagcccggtccttttttacgcagattgtccgccattttccccacgcattttctgcaatgaccgcgtggcaaaaacagcccagtacttcagaaaggtgacgcatgaattcttcctttgaatctctgattgaacagtatcccttacccattgccgaacagttgcgccactgggcggcccgttatgcctcgcgaattgccgtcgttgatgcaaaggggtcgttaacctacagcgcgcttgatgcacaagttgacgaacttgccgcaggtctgtcatcactgggtttgcgttcgggggagcatgtaattgtgcagcttcccaacgacaacgcgtttgttaccctgctgttcgccttgttaagactgggcgttatccccgtgctggcgatgccctcgcaacgggcgctggatatcgacgcgctgattgagctggcgcaacccgtcgcttacgttattcacggggaaaaccacgcagagctggcccgacagatggcgcacaaacacgcctgcttgcgtcatgttctggtcgctggagagaccgtgagcgacgattttacgccgctcttctcccttcacggtgagcgacaggcatggccgcagcctgatgtttccgccaccgcgttgttgttgctctcaggcggcacaaccggcacgcccaaactcatcccgcgccgacatgccgactatagctataacttcagcgcttctgctgaactgtgcggcatcagccaacagagcgtgtatctcgccgtcctcccggtggcgcataactttccgctggcctgccccggtattctgggaacgcttgcctgcggcggaaaagtggtgctgaccgacagcgccagctgtgatgaggtgatgcctttaatcgcgcaggaaagagtgactcacgtcgccctggttccggcgctggcgcaattatgggtgcaggccagggagtgggaagacagcgacctttcgtcgctgcgcgtcattcaggcaggcggcgcccggctcgacccgacgcttgctgagcaggttatcgccacctttgactgtaccctgcaacaggttttcggtatggcggaaggcctgctctgttttacccggctggacgatccgcatgccaccattctccacagccaggggcgcccgttgtcccctctggatgaaatccgcatcgttgatcaagacgagaacgacgtcgcgccgggcgaaaccgggcaattgttaacgcgcggcccttataccatttcgggctattaccgcgcccctgcccacaatgcgcaggcctttaccgcgcaagggttttaccgcacaggcgacaatgtcaggctggatgaggtggggaacctgcacgttgargaacgcataaaagagcagatcaaccgcgccggagaaaaaatagccgcggctgaagtggaatcggcactgctgcgtttagcggaagtgcaagattgcgcggtggtcgccgcgccggacacgctgcttggcgagcggatttgcgcgtttatcatcgcgcagcaggtgccaactgactatcagcagttgcgtcaacaactgacccgtatggggctcagcgcgtggaaaattcctgaccaaatcgagtttctggaccactggccgctcaccgccgtcggcaagatagacaaaaaacgcctgacggctctcgccgtcgaccgttatcgccattctgcccaataagcgcaaaccgacccgaaacaggttgaaataaacccgtttcgggtagcaccactattagaaatagttatcattttcaattcaccattgtcggtatttttggcgtttcgccgtcttacagggactcacaacaatgaaaatgacacggctttatcctctggccttggggggattattgctccccgccattgctaatgcccagacttcacagcaagacgaaagcacgctggtggttaccgccagtaaacaatcttcccgctcggcatcagccaacaacgtctcatctactgttgtcagcgcgccggaattaagcgacgccggcgtcaccgccagcgacaaactccccagagtcttgcccgggctcaatattgaaaatagcggcaacatgcttttttcgacgatctcgctacgcggcgtctcttcagcgcaggacttctataaccccgccgtcaccctgtatgtcgatggcgtccctcagctttccaccaacaccatccaggcgcttaccgatgtgcaaagcgtggagttgctgcgaggcccacagggaacgttatatggcaaaagcgctcagggcgggatcatcaacatcgtcacccagcagccggacagcacgccgcgcggctatattgaaggcggcgtcagtagccgcgacagttatcgaagtaagttcaacctgagcggccccattcaggatggcctgctgtacggcagcgtcaccctgttacgccaggttgatgacggcgacatgattaaccccgcgacgggaagcgatgacttaggcggcacccgcgccagcatagggaatgtgaaactgcgtctggcgccggacgatcagccctgggaaatgggctttgccgcctcacgcgaatgtacccgcgccacccaggatgcctatgtgggatggaatgatattaagggccgtaagctgtcgatcagcgatggttcaccagacccgtacatgcggcgctgcactgacagccagaccctgagtgggaaatacaccaccgatgactgggttttcaacctgatcagcgcctggcagcagcagcattattcgcgcaccttcccttccggttcgttaatcgtcaatatgcctcagcgctggaatcaggatgtgcaggagctgcgcgccgcaaccctgggcgatgcgcgtaccgttgatatggtgtttgggctgtaccggcagaacacccgcgagaagttaaattcagcctacgacatgccgacaatgccttatttaagcagtaccggctataccaccgctgaaacgctggccgcatacagtgacctgacctggcatttaaccgatcgttttgatatcggcggcggcgtgcgcttctcgcatgataaatccagtacacaatatcacggcagcatgctcggcaacccgtttggcgaccagggtaagagcaatgacgatcaggtgctcgggcagctatccgcaggctatatgctgaccgatgactggagagtgtatacccgtgtagcccagggatataaaccttccgggtacaacatcgtgcctactgcgggtcttgatgccaaaccgttcgtcgccgagaaatccatcaactatgaacttggcacccgctacgaaaccgctgacgtcacgctgcaagccgcgacgttttatacccacaccaaagacatgcagctttactctggcccggtcgggatgcagacattaagcaatgcgggtaaagccgacgccaccggcgttgagcttgaagcgaagtggcggtttgcgccaggctggtcatgggatatcaatggcaacgtgatccgttccgaattcaccaatgacagtgagttgtatcacggtaaccgggtgccgttcgtaccacgttatggcgcgggaagcagcgtgaacggcgtgattgatacgcgctatggcgcactgatgccccgactggcggttaatctggtcgggccgcattatttcgatggcgacaaccagttgcggcaaggcacctatgccaccctggacagcagcctgggctggcaggcgactgaacggatgaacatttccgtctatgtcgataacctgttcgaccgtcgttaccgtacctatggctacatgaacggcagcagcgccgtcgcgcaggtcaatatgggtcgcaccgtcggtatcaatacgcgaattgatttcttctgattattgtaaaagggataccgaaaaggtatcccttttacaccactagttaaaaccagtaactcagcaaagtcgcaaaaaatattaatccatagtgattatttaaacaatgaaattgcgattaggataaatagatttaactttctcgttcctttctctccttatactaaagaaataatcatatcaaaataaaaattcacaacagtgcaacattaaaaaatacaaccaacaaacaatcctatatacaaggcacatctccagaatataaaagcacagacaaacaacctaaaaaaaacccatacatataaattattttataggtaaaatagattatatattctcatagctaccacaaactatactagcctgaactatatttattctgctgcaatcaatgcatacataacacaaatatcactcaggtacactactcaaaccacgctgggatttttcctcaagttataatcatcaccccgaaaatcattcggcatttactcattaaatagtcaccccataggcctgtacatgtttactcagaaatatacatccttttctctgtcataaaccctctgattaatcatagataaatacttgtgacaccaatctttttccttaaaggaacgaattgttgtgtagaaggagataatattatgtcaaaaaaatatcagcctttgcttataactcattatatgtcaacatgggtcactataacggaagcagttgagatcactaccaaagccataaaacaaaaaattactcctagcgatatttatcgtcatgccttgagtggcaacatcctactatcggtctatttccagtctcctgtgatacttaagaagatacaaacttttaatggaaaaataaaattcaggcagtttgtgggagacctacttgataaactatgcatgcttgacagggacggttttatttatggtcaaaatttaagactctgtacagaagccagatatatttgtcctgtgcaacaaattatagatacccccct

SEQ ID NO: 55 - DNA, 64 bp, Escherichia coli
tgatagcaatactgtaataatcacagcgcccccaagatccggtggtgctatttaccaaacagtt

SEQ ID NO: 56 - DNA, 2409 bp, Escherichia coli
tgaacggggcgcatattaatggcagtgcatggtgatgtcaaagggtgaaatgcatttttttgtttgtttgctgacaatttcaacaaagtggtgagctttcaatcttattgggtaatgaaccatcgtggtgcataccccccttttatagggcaggtgaatgcgactgctgataaaaagggccaatgacgaatctatcataatctcttatttgacagttggttagcttgcgcatcaacgctaaaatagaactggcaagcatcttgcattctggttgtaagtaatggcggcacttgggccgattcttaaaaaccggaggcaacatgaacttcagacgcctgaaatacttcgtaaaaattgtagatattggtagcctgacccaggctgctgaagtattgcatattgcacaaccagcgctcagccagcaggttgccacactggaaggtgagttaaatcaacagcttttgattcgcacaaaacggggcgttacgccaacaggcgccggaaaaattctctatacccatgcacgggccattttacgtcagtgtgagcaggcccaactggcggtgcataacgttggtcagtcattatcggggcaagtctcgattggctttgcgccaggaaccgctgcgtcatccatcaccatgcccttattacaggcggttcgcgctgaattcccggaggtcgttatctatcttcatgaaaatagtggtgcagtgcttaacgaaaaactgataaatcaccaactcgatatggcggtgatttatgagcattcccctgtggctggggtatccagtcaggctttgctgagagaagatcttttcctggtaggaactcaagattgcccggggcaaagcgttgatgttaatgctattgcgcaaatgaacctttttctccccagtgattacagcgctgttagacttcgtgttgatgaggctttttccctacggcggctcacggcaaaagtcattggtgaaattgagtctattgccacgcttaccgcagcgattgccagcggcatgggcgttgcagtattacctgaatcggctgcgcgttcgttatgtggcgcagtaaatgggtggatgtcacgcattaccactccttcaatgagtctctctttgtccttaaatttacccgccagagcaaacttgtcaccacaggcacaggcagtgaaagagttgttaatgtcagtgattagttctccagtgatggaaaaaaggcagtggcaattggtgagctaagcgttatatcgggatggaataagatgcgggtttttattatttgttatgccgggcattagactttaacaataacgggatatctgaactgcccggagtttaccgtgaatttccaacaactaaagataatccgcgaggctgcacgtcaggattacaacctgacagaggttgcgaatatgctttttacctcacagtcaggcgttagccgtcatattcgggaactggaggatgaacttggcatcgaaatatttgttcgacgaggtaagcgactgctgggcatgactgaaccgggcaaagcattactggtcattgcagaacgcattctgaatgaagccagtaatgttcgtcggctcgcagacctgtttaccaacgatacgtctggcgttctcactattgcaacgacgcatactcaggcacgttatagcttgcctgaggtcattaaagcttttcgcgaacttttcccggaggttcggctggagctaatccagggtacaccacaggaaattgcgacgttgttgcaaaatggcgaagctgatattggtatcgccagcgagcgtttgagtaatgacccgcagctcgtcgccttcccgtggtttcgttggcaccatagtttgcttgttccactcgatcatcccttgacgcaaattacaccgttgacgctggaatcaatagcgaagtggccgttaattacttaccgacaggggattacggggcgctcacgcattgatgacgcatttgcccgcaaaggtttgccggcagatattgtattaagtgcacaggattctgatgtcattaaaacctatgttgctcttgggcttgggatcggattagttgccgaacaatccagcggcgaacaagaggaaaagaatttaatccgcctggatacgcggcatcttttcgatgctaatactgtctggttgggactgaagcgagggcaacttcagcgtaactatgtctggcgctttctggaactttgtaatgcaggactgtcagttgaggatatcaagcgccaggtgatggaaaacagtgaagaggaaattgattatcagatatagcaaaaagcccgctataaaagcgggcttttcagaaatttggctcctctgactggactcgaaccagtgacatacggattaacagtccgccgttctaccgactgaactacagaggaatcgct

SEQ ID NO: 57 - DNA, 50538 bp, Escherichia coli
ctgttgaggcacatcttaacggcgaaaaatattttgtcaaacccgatttttaaatttcccaactgtttgccgtttctatcaacagtttgttgcatttgcagacaatttgttggcgaaaatctttgcagctttgctgattctccctcatcatttgaaatgtggtttcactttctgcaattaaggtcggctttgaatatctcctctgctttacgccaggttgttcacggcactcgctggcactctaaacgcaagagctacaaagtgttgttctggcgcgagataaccccgcttgctgttcctatcttcatggagaacgcctgtgtcctgttgatgggggtcctgagcacttttctggtcagctggctgggaaaagatgcgatggccggcgtggggttggcggacagcttcaatatggtcattatggctttttttgcagctatcgatcttggtactactgtcgttgtagcatttagtctcggtaagcgagatcgacgacgagcgagggtggcgacgcggcagtcattggtgatcatgacgttgtttgccgtactgttggcaacgctaattcatcattttggcgaacaaattattgatttcgtcgcgggtgatgccacgacagacgttaaagcactggcgttgacttatctggagctgaccgtactcagttatccagcagctgccatcactcttattggtagcggggcacttcgtggtgcagggaatacgaaaataccgctactgattgacggtagcctgaatattcttaatattattattagcggcatattgatttacggccttttctcctggccgggactgggatttgtcggggctgggttgggtttaaccatttctcgttatattggcgcagttgcaattttgtgggtgctggcgattggttttaatcctgcgctaaggatttcgttaaagagctattttaaaccgctgaattttagcattatctgggaagtcatggggattggtattccagcgagtgtcgaatcagtgttatttaccagtggtcggttattaacccaaatgttcgttgccgggatggggaccagcgttattgccggaaattttatcgcgttctcaattgcggctcttatcaacttacccggaagtgcgctcggttctgcttctacgatcattacaggccgaaggttgggggtagggcagatagcgcaagcagagattcagttgcggcatgtgttctggctgtccactcttggattaacggccatcgcctggctaacggctccctttgccggggttatggcatcgttttacacccaggatccacaggttaaacacgtcgttgtgattctgatttggctaaatgctttatttatgcctatttggtccgcctcatgggtgctacccgctggatttaaaggtgctcgtgatgcccgttacgccatgtgggtttcgatgttgagcatgtggggttgtcgggttgtagtcggttatgtgctgggaatcatgcttggctggggtgtggttggcgtctggatgggaatgtttgccgactgggctgtgcgggccgtgctgttttactggcgaatggttactggacgttggctatggaaataccctcgatccgagccgcaaaagtgtgaaaaaaagccagttgtatcggaataaacgacaaaatgcagattatttcagcaaacgatttcaaatttaaaaaacaggctttgacattgtgggtgggcatcgctaatattcgcctcgttctcacgattcctctgtagttcagtcggtagaacggcggactgttaatccgtatgtcactggttcgagtccagtcagaggagccaatttcctgctttcatgcatccttgcgaatccttatgttatttttattcaacaggttagcgtgaaaactcttcccggtgcattttgattttaccctctgcatcgggaaaaattggtggtcaaatctggggtcaggttagttcgataatggagtgacccccatatgtcccttaacgacgcaaaaatccgtagtctcaagcccactgataaaccctttaaagtctccgattcccacggtctgtatctgctggtcaaaccaggcggttcccgtctctggtatcttaaataccgtattaatggcaaagaatcccgtattgcactgggtgcctaccctgccgtctccctgtctgacgcccgccagcagcgcgaaggcatccgtaagatgctggcgctgaacatcaacccggcgcagcaacgtgccgctgaacgcggctcgcgcatgcaggagaaaatgtttaaatccgtggcactggagtggcacagtagcaagaaaaaatggtcgcagaataccgcagatcgcgtgcttgcccgtctgaacagacatgtctttccgaccatcgggcatctaccagttaccgagcttaaatcacgtcatttcattgaattactgaaaggcattgaggaaaagggcttgcttgaagttgcgtcccgctcgcggcaacacctcagcaacattatgcgttatgctgttcatcaggggttaatcgaaatcaacccagctgcaaatcttgacggcgtgacggcttctcccgccagacgacattatcccaccctgccactggagcgccttcctgagctgcttgaacggattgacagttatcaccaaggacgggaactcaccaggcttgcagtcctgctgacgttgcatgtgttcattcgctcaagtgaactgcgctatgctcgttggacagagattaacttcagaaatcggatctggacgatacctgccacacgcgaagcgattgcaggcgtacgttattccagtcgaggtgccaaaatgcgtacaccgcatattgtgcccctttctgagcaggttatctctattctgaaaaggattaaggaaatatctggcgggtatgaactggtgttccccggctatcatgacccctacaagccgatgagtgaaaatactatcaataaggcacttcgccagatgggatacaacacgaaacaagatatctgcggtcatggtttccgggcaatggcgtgtagcgcgctgatggaatccggtttatggtcgcaagatgcagtggagcgtcagatgagtcaccaagagcgcaacactgtgcgtctggcttacattcataaggccgaacatatggaagcccgcatggacatgatgcagtggtggtcggattatctggatatgtgcagtgaaatctgggtgcccccgtacatctggagtcagcaaaacattaatctcgcagtaacctgacttatgaataatcttgtaaagaaccaggccgtatcagcaaacgctgatacggcttttcatccacaggccgtttttcatcttctaagtcgtccaggacatcatggttcttaatacacatgcgttcgcatgtgcttatgttaagtagacttattgtcttacacattttatccgtatcattaaccagaatatgttccggagcagcgggtgatagtgccgccagtccacactcatcgctgcccggaaaaatcatcagtggggaggcaaacggtaagcaccccgctattctgcaagacatttctgcagtttatttaacctccccgaagcatttttataaggcgaggcggtattaaattgaatcatacgacctcgggtccatttattataccaaggtttaccgtaaagctcatcgttactgaatcgttcaatcaaagccacgagttgctgcttattttcctttaaccgtgccaataaaacttcgtactctgtaatatcctcatagtcacggtagaatttctgtgctaaacgccccaattcattccatttaaatccttcctcaggaaaaataatagtttttccttttgcctcttggtcatgccagtgtaacaccagctctccccagccaatcagataggaaaccagattcgctacgctaatcgtagtccccttcgcgtgcccttccaatagaggttcaaaggcgagttggggcgtaatagattctagcttcttatttaataaagaaaaattactattaatagctttaattaactcttcttttgatgatggaacagccatatctattgctccttgtatagttacacaactatttctaccctactatttcgagtgattcaatcgtctggttcacataacctaccacctgttcaaaatgcttatcgacaaaaaaatgatcggcagcaggaaatataatagtccgcgtctttcgtgtggtgaatttttcccatgcaagtaattcatcctgcattaccagattgtcagcatcgccatgaaatagcacgatcggacaggttaatgtgcgcgccttggcctgaaatacatactgctcatagagccgataatcgtttttaatgatgggggtgaaaattgtcattaactctttattacgaaagacatcaaccggagttccgcccagcttgacgatctcttccataaacgcctgatcgggcaaggtatgcagtattacttcatgagaggcccgatcgggtgggcgacagccggaaaaaaacagcgcgcatggcatgtcatgtccatgatcgagaatataatgcaccagttcgaaggccatgatccctccgagactatgcccaaaaatggcgtagtctccacctgtgtagtgtttcacaaattgttgataaaggtcagcgacggcatccaccatcgtaagacacagcggctggcgtattctagttcccctccccgcaggttctaaaggccgcaaagtaatattgtccgacagcacgctacgccatttataatacatggcggcagaaccacctgaatatggcaaacaatacaaactgatattactcatcgtcccactccttgttgtgtaatagaattcgtttaatttgatgatttaatgtcagaacgaaagctaacaggataattccgaacggtatcgccaacacgctcgatggaccccataccaagataaaacgccagtcaagtcctggagatagtatacccggtgcgacatagagcatggcggccacgagcccaggaaccgccaaggcgatgatatagtcacgtacgcgtaaacgtaacctctgctgttttccagggccatgcgccgttgcgcgataaacacggaaagcaccgcgcactacaaccaccgccccccaaaaacacagcaacaacgtgaggtagacgaaaagggtatcggtggctgtaattgcatcaccagcgccgtcagcatatttgccaatgcgcagataattatcgatatccgcgcaaagctgtagtatcagattcgaattcatatttgccagcgcaacaatgccaatctgctgatccggtcgcaacgcaatgcaagaagaaaagtttggattctgcccaccgtgactgatgtaagggccttgattctggtcgataaaccaaccgctggcatagaggatacgattgtctgcggcaagcggaacatcactattaccacgccaactgttactcatcgcctcacgcagcgttgccggcaaagcctttctgtgcaaccaggcgtctatccatatttccatatcaggcagagtgctatggatataggcggcaggaacatggttccgggccagaggcgcatgaaacagaacgggtttgccgaatcccagtttatagccgcttgccttgttgacaataatctcatcccccttaactgccacagtcgccgacatgcccagcggctgcgtgagtcgttccgcaatgacctctgtaaaggtttttcccgtcacattttcaatcaccgcgcccaacacatcataattggcggaggcatagctaaacttcgcacccggcgcaaacagcagattctcgttgcgcagttgctgtgccacagcgctcccaggcatagggttttccagccgagccagtgttgaaaaaggcaatcctgatgtatgataaaggaaatcagccacggtcagggaagcaggttttccctgataattcaagcgcatttccggcagataggtaatgatatcatccccttgccggagtctgccttcctgaatcagtatttgcaccacaagtccggtaaacgccttactcatcgatcccagctcgtaaactgtgtctagagtattcgctttctgactagccacatcggcaacaccgtagacaaatcgctgacgtacccccttaatggtcacacttacggaaagggctgggaccttggcctcctgcatccgttggtgaattaatgtcgacaggcgctcatcttgcgccccgataggctcatgttcttgcgccaaagcgcacatagcggaaataaagagcagcatacagcacaggagatgatataatgttttaatgctaacgtgttccattattgtcatcctgtgaacacctcataaaataccatcaacacattcggagataaattcactgtgctcacggatagcgggtctggcataaatatcggcggcagtcagtccgattttataaatgtggttacagctgtcgacgaaagagataacgtgcatcgaggtcgctccgtattcgaaaataaccgcgtgttcgtcataatgatcgatgcataacaatgaacgccaggttttctccacaaagtcgctgaccgacaaataactcactggtaacatagcgttctctctcgcatcactggactgaatttcataccggacgcgatcaaacgaataaccgggtaagcctatagtctgcacggctggcatttccggtaaacaaatagtcactcctcgttgccaaagagtgcccaacagcggcaggatgtcctcaggcgtatccgtattcagcatgggggaaaatactgtttgcccaacccactgcgcatgctggtgatacaatatggaaaacgtccccgcgcgaccgatttccagcatcagcgttccctccgtcaccgccagattagccaatatttcgctcagttcactgttgccggccagcgtctgctccggtgtcgtttcagccacaatcacctgctgaacagcgttttccagtgagatgatgcgcgcaacatactgcgctgctgcagcccccgtcaggtaaccgatgtgctgcacaggcgagatactttgttcgatcagccattcactaagactcacctgctggataaactgacgcaatgctggcgtccaatcggctggttcgcagatttgtgcaacatcctgagacaggcgctggtgccgctggcgcaagttaggttgacaagccagcaaatgcgtcagggcactctccagcttatcgtcccggtccggatataggaacaccaaggtagtttccatattgataggggtaaaagacatgtcagcatcccgcagtttcgccaaacttgcacgcaacgctaccacactgtctgccgccagcgcacagcgatacgggaaatgtgcccggcgttgcgcgagagtataggcgatacgatctttatctgcttccgcataggtcgccagagcgtgataatgagcatccaactgttgtctaagggctaatggcgttttggcgctgaagaaaaacaggcggcgctcattttcttgcaccgcttgcgcaggcgtctcgcaccagttttgcagaaccaaatgagcattggtccctcccagcccaaacgaactaacggtggcatggatccttttcgtttgtgggacagaagtcactacatcactgagataaaatggcgaggctggctgcaacagttttttatgtttatttactaggttgatctgcgggggaactaaaccagtatatagcgtcagtgcggttttcattaagctgacgataccggaagcgactcccaggtgacccaagttggcttttaccgcacccaattgaatgctgtgcggcgcacatgccggtgcgaaaacccggtgcagagcttcaagctcaatctcatcacccaacggggtaccggtaccgtgcgtttcgatcagtgcgatatcagtcggtacgacttctgcggcggcaagcgccgtattgatcgcttctacctgtccttctacgctgggggcgacaaaccccagccgacgcccgccgtcgttatttaccgcacctcctttaatcaccgcatacactctgtcttggtcgcgtagtgcatcctcaagacgttttagcaccacaactcccgcaccgctgctgtataccgtgccggtcgcctcagcgctaaacggggcgcagtgtccgtcttgcgataccagcttatcaccttgcggactgtagccgtgcgcctgtaaaaaacccaaggtgaccccacctgccaacgcaacatcggcttgaaaagtcaataacccctcgcatgctaaatatgctgccaccaacgaactggaacaggcggtctgtacactcacagcgggtccggtaaaccccaacttgtaggcaacctgagcacacaagtaatccttttcgttaccaatctgcgcctgaagataatggtgatcgccgctcatcttcaggtatggatagacgcgatcgataaaatagttattggcgtaggtcgccccatagacgccgactcgcttaagttgcgtgggaatatagcccgcatgctcaagagcgttgtagcagcattcaagaaatattcgttgttgcggatccatcaacagggcttcgccaggcggaatattgaaaaatgcagcatcgaagtcatagggagcggtgattatattgcgcagcctaatccaagggttcccattatcgtcttctgtgcatgtcggttgagtgaactcctcacccgccagcaacttatcccaccactcgggcaccgattccgcaccggaaaaacgcccgctcatgccaataatggcaatatccagtgagccacaggtaaaatcatcctttgccattgttgtattccttaagggttggcatcgtgtttatagtgtccacaaagtcggcgcgcccgtcagcgtggcgctgtgttggcacagccaggcatccagatcagtgaggctgttcttgtagcgcgccagcaggagttgcacatcattcagcgcaatgcgcgtgggatcgaaacggcagtggaaggagagaccatcagctgccgagcgcgcaatattaaactccagcacgcagccgagcgcgttttcaggcgcggtatagatatcactattaaagtgatcaatatgaaaatagcggagtgaaggttgcgcctgcacaccgatgtaattcattcggatcccttgcgcaagagagtcttccggtgcatgccgcatttgcagcagaccgtaatctcccccaccatgcgtgcgttttgccaaatcggaagcgatcgcagataacagtgtcgccatatcgccatgcagagggatcgcccaaggataaaatagagtaaaccacccgaccgtatccgcaacgtcaggctcatcgggccagcagccgcgtcccatgccttccatctcgatgcgacaccaaggctcttcgctgtagtaacgcagcaccagcgccaatgccgttagcacataggtttcggcgctgtacgcggtattaccactggattcaaacaacctcctgacgcaaggatggcgaaagtcttcacgccaagcgcgcgtacgaggtaatgagtcatctggcaatgacacgggtgggaaatgcagcggtagcgtttgacatactgtgcgccagctttcgtgtgtggcggaatctaccgttttgctcgccagatagtcattccagcgatgcagtccgctgttgctggtgccattgacagtgctgacggcgtccagcgtgctgaggattaaataccaagagtgcatatcgacgcacaagtgatgggcacagagtaccagcgtgctagacgcaggctgcggggcgtgtaacagagctgccgtaaagactcgaccatttgtcacgtcaagcatgctattgcactgagcgatcacctctgccaacgtccactgcgccgtcgaatattccgtgagcacctcgttgggataacacacattagggtcgcatactagcaaccgcccctcagcgtccagcgcactgtgcaaagctggctgctgctggattaatgtatgcagcctgttgtgtaactgctcgagcgggcaagcccggcaacactttcagcacaatgacatggttataaacattgggcactggcaacgccaactgcgtaaaccaacgcaatgcgggtagatcgatacgggtgttatgagcatactgcgcgagctgtgacaccgttgtatgactagcgagaaactcacagatggcgttcactgttccacactccatcacctgcaccgctgacatcgtccagccgtggtgcctgagctgcgctgcaatctggatactcttgatggagtccaaccccaagacataaagattttcgttatcatcaaactcagtttgctccagcgccccttccacacatacccgaactgaatgccttatcgccgcatctcccagccgctcgctacccgatgcaggcgcggtgtttcggaccgttgcgaccatctgacgcacgtccaccttgccattgtgcgacagcggcagttgggcgatagcacagcactgcttgggttgcatgtaggtgggtaattgctgacgcagatgttgcattacggtagctacatcaacagatgacggtgtcacgcaggctagcaacccgctgtgctgcccctgcacatcatcaatcaccgccaccgccgcactttctacctgaggtgcgctcaacaacgcttgttcgatttcgcacagctcaatacgatagccattaattttgacctgatcgtctttacgtccctgataaaccagcgtattaggagcgatggcgtagccaatatcaccgctgcgatagccaatcatcaccccattggtatctttaaggtaggcggcggccgtttgttgcggcgcatcgatatagccctgcgtcactgacgcgccataaatcaccaattcaccagtttcgccttccggtaccggacagccccaaggggagcaaattgctacctggcaaccgtcgatcgccataccgatgggcaatgaaggcagcgtttcttgcccggtgtagcgatagatcatgcaaccaacggtggcctctgtcggcccatattcgttatagatcacggcctgaggaaagagagcagccgccttacgcgccagatcccgcttgaaatcctccccgccaaccaccaaggtacgaatctgctcactgcttatgccagccgcacacaacaaccgcaggtgtgcaggcgtcagtttgatcactgtgttgggctgatcaaccacggccatgcgcagcaatgtttcgctctcggcgtgccgacaaacgctgatgctagcgcccacacataagggggcgaacagcgtagtgatggtcaaatcgaaggacagcgaagagtagagcgcagcccggtcctgcgctgtaaagtaacgttcggcggcgaaatggagatagttagccagattgccatgagagacttgcacgcccttaggctcgccggtcgatccggaggtaaacagcacatatgccagatcctgcggttcaatagctggccaaggttctctagcaagcgccgaagtggctaaggcctggagcaagctggacgcgggaaacgccagcgcctgcgtcaattcatgcatcgccggatcgtaaaggatatgcgctacctgcgctttacgacacatggcgtaaaggcgggtcgttggcaacgcgggatttagcggcagaaatgccgcgccgcagcgcaaaataccataaataaccatcaccgtttgagcgctatgctcagcgataatcccaaccacttgaccgcgtccgatcccctgttggcgcagataacgcgcaacccgctcaacagcgtcatccaactgccgataagtcaaagactgttcattatcaattagtgctgtgcgatcaccatgctccacaacttgcgctgcaaatcgggaagtaaatgagggtttgagtgagccacatgccaatgcgacgtgcggcgcaggatagacttcgagatcgcctagacgagcgtcaggttgccgatccaatgcagtgactaaatccaacagcccatttttcatcgctgtcagttggtgcggagtgaaagcgctacgcagcgcctccagactcaacctaaggctttctttatgattattaacagtttgcaaaacaatctgtagcttataggactgctcgccgctgtagtaactctccacgcgttgcgcggcacctgcaatgtggcgttcataggtaaagttataataattaacgcaataatcgaacgcccgcaacttccctcccccctgttccgccaaatcctggttgaataaggtaatgggatatttgctgtgtttaaaaccgcgtttcagttcgcgctggaaaaaggccacccgttcacagaatcgttccgtgcgcaccagtcgataggccagcggcaattgattagtaaacatgccaaagcaacgccgcgcctcgcgagtatgccgattggctaacggcacgcctattacgcctttttcctccccccatactctggcgcgatagagagcgaagagtgcaataaacagcgtattaagcgtacagccataacgattacacaacctgtagagacggttaatcatggctggctcaagccaagtggaacaactgatgccctcagtagtaacgatgggggaactgtctggaaagcagtcgcggtattcgtcgatatagtcacgccaccagccacgatcaacggcaaagcgcgttgacgcctgataagattgctgctgcgccagaaatgcgctataggctggtgacgcatcatctggtacgtcctgctgttcgtatgctcgcttgacatggtttgacaacaacgccattgaccaaccatcagcaatgccgtgatgggctttaaataaataaccgctgtattgttcaccgcacgtaaaggtgacaaactcgaacaaatcgtgcgccagcagggtaaagggctgccggaaccactcatcaacaaatgtttcgatcgccgctgggcgtaggttctccttgtcataatctggggaaaaagtcaaatggcggatatcgcgccagtgataaggctgcacttggctgaccacttcactctcctctcccatcacaaaccacatacgcaacgcatcaaattgccgaatggcggactggatggccgcgtgtagtcggggcagatcgacaattccctcaatggtgaccacaccaccaatgatgtttacggcactgtaaggatacagttgatcaatgatgtggcactgttcctgtggccacgacaacggattgcccgacatcatggtgccacctccatatccaagtgttgggagcgcaccgcctcctgattccatcgcagcagacgaggtgaaagacgcagcagacgccacgccaacaacgcagccacaaaagtgccgctcatcgccccaaaatagacgccggtaatacgcatctctaacacaatcgccagcaggtatacgacagggacagatataaacacgtgacgcatcagcgtcaacaacaccgaataccaaggcttaccaatggcctgataatattcacttgctaacaggctgatagcgacaaagggtagtgccagtgccatgatacgggtttgcagtaccgcatagtcactcacggcaacaacacgagtaaacaggggatacatccagggtgccagtacaatatgcataacggctaacaccagcacaatagagaaggccagcgcgacggcggcccaataggcattcagcgtgcgggtgacatttccgtgtccccagttttgccccaccacagtcagcaacgcggtcgcgatagccagcatcggcgtgatgatgaaatagtcgatgcgaccagtgagcgtaaacgctgccatcgcgtttacgtccagcctgacgataaaaaaattataaatcactatgccgaccgcaatgatcagttgcatcagcatctgcgccatgccgacggagagaaactctcggtagattttccaggagaatgggcgtaacgcgatgcgtatactcaacccgatatgtaatcccatcaatgtgtagatgaaataggcgaccatactcagttgcgccagaaacgacgccaatgccacccctttcacaccaaaatcgaatacaaagatcatgattggatcgagcataatatttaccaacgcccccaacaatgaggccttcatgatgaccatgatcttacccgcgccttgaaacagccccatcatgacgccaatcaacatgatgctgaacacggtcagcagcgaataataatagaactccgttgcgtagccgatgatgctcttcgtggcccccagtgagcgcaatagcggctgggcataaacatagccaagtacggtgatcacgatcgcaaagaatagcgcgatgatgataccgaccgacaaaatccgctgtgcacgatccaaccgctgcatgccgatggcgcgggacagcaaagatcccataccgatttgaatgccgttggcgatggcaaataaccccattccaacggggaaaaccagccccacaccggcaatgatgccgctgttggtgacatcaatgtggctcagccaaaaaatatcggcgatggcataggtcacctgcgttaacataccgacaaacatcggcaacgccatgcgcaggagtaatttatacagcgagccgtcaaacatacccgccaccgtgaacagctcatcgttcggcgtgccgttgtctggctcaagcttattcaccgtcatacctgctccttattcattaaatgcgccgcacctttattggcgctgtcaccgatatccgcctctagtacccttccggtaccgtgaatccgccactgatgctttcgcagaactcagcaaagttaatcgtcacatcatcgtgaaaatgcccggaaatgatctgtatgccgcacggaagctcatccatcgttttcgccaatgggtaaacggtggcaggcaaaccaaaaaccgttgctaacatgttccagaacaaatgttcgttgtaatcttgcggttcgccattgacgataagcttgcgcttacgcaccggctgctgcatgtgcgcaaacgccagcaccgggctgacaggtgtcaacaacacgtcataacgcgcgaaaagggtttctatcacccggctgtattcgtggcggagtttgtctgtattccgctgttcgccactgtctttcagcatgccctggtaatagctcgttatcccctcaggcacatccgccagcttgcccacaagcctgaagcccagcgcagccagcccggctgtaagacgctggcgtccattgagcgccgtacttaccagccgaccactgagtttgactgctatatcaaacagtgcgtcgggatcgatatcggcgggcatagcatcatcaacctccacgccaggctgtgcgcgtaacttgtcgataaacgattgaaaacgctgtgcgatctgttgatctatctcatggtggggcgcactaaaccacgtgcacacgcggtagtttgctttggcctgataacggctaaaatcgggaatacgcggcggttccacccagaatgtgctcaatgcgcgcatcatcagacgcagatccgccgcgctgcgcgccatggggcccgccgtcgagagatccggctcatcagtcgcttgcggaccaccaccgggcacatgtcctctgaccgacatcaaccccaagctacaacgatgggcatagacacctgtgtagtgtgcgggaatgcgcagtgagccaaacaaatcgctgccaaattccacgggggtgaaatccgccgccaccgccaccgccgctcctccggacgatccgccgggtgaacgttgcctatcccacaggttatgggtggtgccatacagatcgttataggtttgccaatcggcagtcatcatcggcacattggtttttcccatcaggatcgccccggcagcgcgtaagcgtgcgatggaaggagcatcctgcgtcgcccggttatctttcagataatgggcaccggacgtggttaaccacccttgcacgtcaaacgactccttaacagtacaaggtaatccgtgcaacacgccccttgcgcgcccctccagtcgctcacgatcggcgcgcgcggcggcctccaacgccaacgcatagtgctgctgcaccaccgcattcaacggcttgttaaactgcgccatacgtgaaaaatagtgattcaccaacgccactgaggtggtttctccggacgccaactgtgccaacagtgtccctgcgctacgatagctctgctcactcatcgcccttttctccctgttgggcacgtttacgccgcaacgccagattctcgcgcgcagcgctgacctgcgaaacctcagcctgcgctaatacgatatcgtgggcggcgggtagattgtgcagttgctcatcaaggtaacgcgccacatccgcgatggttggcagacggaacagatcgacaatgggaatctcctgcccgataatcgcctcaagtgcctgctgaatacgcaccaattctatagaactgccccccagcgagaagaaatcgtcttcggccgacacgtggctcacgccgagtacctcctgccagagcgccaccagccgctgttgtaacgcactgtccacctggattggacccacgccgtcacgctggtgggcaatttgttcgccctgcagctgtaatttttgccgatctagcttgccgttagcggttaacggaaaatcggtcgctaacatcagatcactcggcaccatatagtcaggcagttgctgacgcaggccgcgcagcatggcatctttgtagctctgcatgtccagcggcgcagcggtttccttcggtttctcataggtggagaaatcgcgcagcaatgctgcagcacttgccgcctcttgccctatcgcgccccccacggtgcaatggacatagcgatgatgtggcgacaattgaaaatgcgatgccacagcggaaaagtctgccatcccaagttggcacagccccaatccgtagcgcggcgcatcttcttccagtaaatggcagagagtacctgcttccatcaccgagaagtgccaagctgcctcttgcccatagaatggcgagatcaccgccatatcagccaccataaacagcgtgaatgccgcccgatcggcaatagactgattaggtccggcatgaaaaccactgttcagctcgacttctggtgctaccggcataagacagctctgtcgcgggtcgaagtagtaaataccggatactccctcttcgatcttgtctggatgcaggtacacgtaggtttgcaccgggtatagccccccggcggacgcataggcatacttggcaaaaggtagaccgggtagacgcatctgccccaagcccgacagcaattgccccaactgtgccagcgtggttttttgcgcgctgaaatgacgatagctgcggcgtttgatgtaacgtgtgctatccgccggtgccgtcagtgcaatgcccagaccatccagcgcgcgaatatgtggctccttgagtttgaacgctagacgctgtgccggattcacaataataccctgcgccagtgccgccgcctccgcttccttagcttgcaatgcctgcgcctggtggcgatcgtgcagtttggcaaaagcgaccagccgacgatgttgagaattacccactgccaccaccactgactgctccacatcgggatgtcgcgcaatgcagcgctcgatttcccccagttcgatacggtaaccattcaccttcacttgggtatcgttgcgccccaaaaaggcgacttgcccgtcagcaaagtagcgcccgcgatccccagtgcggtaaattcgctcaccactcgcttcgcgccagacaaagctcgccgccgttttctctgcgtcgttcaggtagccttgtgccagccccatcccgccaatgcaaatctctccttccaccccgaccggacattcctccagttgcgcatttagcacgtatactggctggttgcgcaggccccgaccgtagggaatactggtccacgtcgattccacctcacctatcgggtagtagaccgaccagatggcgcactcggtcgctccacccagactgatgatgtccatcgtttcattgagccgctcgcgcatctgctccggtaacgttagcgggatccagtcgccgctcaacagtgccagacgcaacgtcggataactcatccgatcgccgctgtggtattcgcacagcatctgcatcagtgcgggcactgcattccagacgcttacatgaccgtgtgccataactgtctgccaatgacgcggatctttttcccgtcctgcttccggcagtaccagcgctgcacccaccataaaaggcgcaaaggcatcgtaaaccgacaggtcaaagctcaatgatgacagcccgaacaccctatcctgcgcattgaggccaaagcgttcgttgatgtcttccagcgtgttcatggccgcacggtggtcgatcatcactcctttcggggtaccggtggagccggaagtgaaaatgatataggccagatccgtgacatccccagccacttcaggcaacggcgcagcaggcgtgtccagcattccgtcgtcgatgatcagcacgggcagcgacggctccaattgcgtgagacccggctgcgttacttgtacccgcacctcgcccaccgtcagcaaaagctggcgacgctgtggcggtagcaccggatccactggcagatagaccgcacccagtcgtaaaatgccgtgtacggcggcaatctgctgccagcctttttccatcaccaccgccacgcggtcgccatgctgcacgcccagcgctaacagggcgcgggccacatgatccgccgccgtcgacagttggcgataggtcaattcacggataggactgatcagcgcagtttcctgtggcgtcagtgctgcctgacgcagtaatccatggtgcaacaaggccgtaggtgcaggagcctgcgtgaccggtgcactaacggtgggcagcgccagagaactatttaccccccaccaactttgcggcatggcaaccagcgcctgcagcgcatgacaataagcaccaaacatctgatccagcagcgtggtatcaaacagttgctcgaccgcgtcccagttgaaatgcaactccccagccaactcgatcacctggtgatcgagccacacctgcggtgtttgggtaatattggcgtccggacacagagtaaaacgggttgtgtcccgagggtcttgcgcagtcgtctccccgtcgatatccaacatactagtgaataccaccggcatcggcgcatggaaacgaccgctatggatcagcgcctcgctggcgcggatcccactgaaacgacgatgttcgagatcttcccacagttgcacctgaatacgctgagcgttgtgggcataagagtgctggctgtcgtaacaaacattcagcaagctgacagcggtaaaatcaccaataactgcctctgcgttggggtaaccctgcgggcggttgaacaacgtcagattgagcgtaaacgtcgggctaaggctccaacgtgccagcacttggctaaagactgtcaacaacaatgccgtcttggtgatacgtgtgcgttgggccagcgcgctcagcactccccagttgtgggctgacagccgatgacggcgacgtacgaacctgatcgcagacagttgcgccaaatcgccctgtacgggcagcgttggtgggccatacagctgcggcagcgcccgttgccaataggcctgatcgcgtgcataggcttcactcgcctgctctaccaacagcgcctgcacgtagtcacgaaaagagaacggtagcaacggcagtgacacatggggctcacggtacagcatcatcaactcctgctgtagcgtgcgcatactcagagcatcggcaatcagcagatcgagactgaaatgcaagcggccatgttgcgccgtgcaagccgaataactgaaatcaaacagcggccaacgatctgcgggatgcacatgatgcgacagccgatcgcggatcgccatcaaggcatcgtttcgtgcgttaggggacaaagcactcagatcgcgctgctctaactgatacgccggcacttgcgccagaatctgctgagtaccgtcggggagtacccgcgcacgtagcatttcatggcgagcgatcagcgcattcaccgcatgggtaaaacgcgtaacattaaagtgttctacgtcaaattcatggtagatgtgggtcgcgatcgaggtagcacccgtctgtcgtccaagccagtaggcgcgctgaacatccgtcaatgggaacggttgatgacgatgctcagggtcgtgcactatcacccagtcatcctgagacgcggcagcgtccgtgatagattgctgtgcaatacgcgcactcagtgcccgtagtgtggagtagtggaaaatgtccttcagggtcaaggcgcagtgaaaagtgcggttgatctctgctaccaacgttaccgccaacagcgaatgtccccccaagcgaaagaaatcgcactcaggatcgacgttttttatcggcaaatagcgcatccacagcgccagcaacatctgttccgtgtcgctcagcgcttgcgtctgcggcgacacaagggagctatcggcaacgaaattttccgctaaccgcttacgatcgattttaccgttgtcagtgttcgggaagtcggccaccctctgccacagcgttggcaccatatagtctggcagttgctgccgaagctcgtttttcagttgctcgaatagcgagggaggctcactggtgatgatgaatgctgccagtgctttgtgtaacggtgctctttcaatacaggccaccaccgcggcgtccacatgcggatgccgtgccaacgtccgttcaatttcgcctaactcaatacgataaccgcgcagtttgatctggctatctttgcgcccaacaaaaaacaactgcccctgcgcatcactcctgaccagatcgccagtgcggaacatcctgccaccggggacccctggttctgacaagaagaactgtgcgttcaactcaggctgcccatcatacccttgcgccacaccatccccggcgatgtaaagctcgccgtcaacgccttgcggcactggatggccctcattgtccagaatgtatatacgggtattggcaatgggagcgccgagggtgatgttttccgcttgggttatctgcgatttcagcgaccaaatggttgtttcggtgggaccgtagaggttccacaatgaaccacaacagcgcaacagttcttccgccactttcgttggcagcgcttcaccgcctgccagcacacatagttccgggtcgccacgccaacccgccatcaacagcccgtgccagaacgagggcgtcgcctgcatcagcgttggtcgatagtcggcaatcagcggaatcatacggaagctgtctgcggcgcgttccgcctctgtcagatagagactcgcaccggagatcagcggcaacagatactccaagaatgagatatcaaatgttggcgtcgtcaccgagagcagccgtcttgcgagccaaccgcaaggtcgctgatatcacaacaagttaagcaacccgcggtgaacaacgcacacgcctttaggttcaccggtactgccggaggtaaacaacaggtaggcctgcatatccggcaacagcgcgcaaggtgtagaataccggatcgcattcgacatgtcctgcatcaattccggcaacgacagttgtacaatttcaccccactctcccggctgacggaccaccagacagaccaaacgcgcgcgttgcataaggcgttgcaaacgcgcggcaggctgatgaatatcgaacggcacgtagcacgcccccacaaaccacgtcgccaacatggttgcaatcacatccctgtgacgtggcaacagcacgccaatacgatcgcccggttgtatgccatgcgctcgaaaacgcatcgcgatgaactgcacacgcgcccagagctcagcgtaggtcagtgtgccgtcatgctgctgtattgccagttgctttgggtgctgcacacagcgctgttcaatgatacgcagcacatcctgcggcccgagccacgggacgttagtggcgttgagcggatcacgccgcggcgttgcggtctccggtgcatgcagagggatcgcccctatcggggtctccagtgatgatgtcaacgataagcagtgctgacgcagcgcctcggcaatctgcttcaccacatcagcatcgtataaccccaaatcgtactcaaaggagacgtcgaacgtggcgtcgttttggaacacctcgactgtcatgtcgtatttgacggtctgattgtgatacgtcacctgctcccaatacgcaccagccaaggtaaaagcgcgtggggtcacgtggttatggtagatatagaggatctggaacaacggtgaatgggaaaggctgcgagggagatccagcatattcaccaagttttcaaacggcagttgctggcgcccctgcgtctctttcacgctggccttcacacgctggagcgcctcgcgccctacctcaaccccattaaaatcggtgtagataaccgcagtgctggcataataaccaatgctactctgcaattccgggcgaatgcgccccgatactggcatgcctatcaccaatcgctgttgctgagcgtaacgcatcagcaccagttggaaggcagtcagcatcagcacgaacggcgttgtttcctgcgtgcgggctacgtgtttcaacgcgaggcttaatgtttcatccagggtgatgctgaaccgggaaccatgtgtagagggttgtgccgggcgcgggtgcagcgatggaaatgtcgacagcagaggcgcgtcttgcaaacgcgcacgccagtaggcaagttcgttcgccagcaaggtatcctggaaccattcgcgctgccagaaggcataatcggcatattgcagcggcggcggaggcagcgacgtttcattaccagcatgcaatcgagcatactgctgctgtaactcatcgaacaatagccgtaacgagataccgtcgatgatgatatggtgcgcgcaaaacaccaaatgacaaccttgatcgggttgaataatctgagttaccccccacagaggaccgcgtgccagatcgaaccgggtgtttatcacctgctgaattaccgcatctagcgctgaagttggggcctgcgctgccagcgtgaccgtatcgagaactaacgaagacgcatcatctatcacctggcaaggccgatcgttacgtactatgatacgggtacgcaagatggcgtggcgtgcttgcacatggcgcaatgcctccgtgagcatcggcatatccaccacgccatgcaaacgatacaccacataaaggttgtagttagtggcggtactgtcgtatttttgcaaaaaccacaaccgctcctgattaaacgacagcgggattgcctgcgccggatccgctttgatgatgggaatgcggctgggcgacacgcctgattgcgccaactgtcgtaatagcttttcctttttttccgccggtaacattcgcgccaatgcggcatgatgtatcgtcatgaccgtcctttccttttcgctgtgttaaatacttttgccaacgtcactcattaatcatgtcgttaactagcacggcaagtgcggaccctccatcatcctgctgctcctgctcgaccaactgcgctaacgcgcgcacgctggcatcctccatcacgtcgaaaaaggaaagagtgacggcgaaccgttcctgtacctgcgccagcaacatgcccagcatcaatgaatgtccgccagcttcgaagaagttgtcgtcaatgcccaagccgtcaattcccagcaatgcttcacaaatcgccactaagccgcgctgcgttttgctctctggagccgcgtaaggcaccgaaaacgccggacgcggctgacggcgcaccgacggttcgctagggatgacacttcccgcgtccgccaccggcgttacggcgctcctctgttcttctggactgtcgacccagtaacggattttgtcaaaggcgtaggtcggtagagagacacggcgcggttgctcacctgcaaacgcagacaaatcgatgttatgccctcgcacccaaagcgctgccacggtatctaagatatgtttgtgctcatcgctgctgcgggcacctgctggcagcgagctgaacgcgagacgatcacctaatgcatgaccgttggtcagctgggtcagggtggcacctggcccgatttccagaaaatcgacatcaaatgtagcttgcgcctcttgcagtgcagcggagaactgcacaggcatcagcatctgttcaatccagtagtccggtgtggtgagagtgtcggcactgacgtgcgcgccggttacggtagagatgatggtgagcgtcggcgggttcagtcgtacattctcaaatgcctgacgtagcgcctgcgccgcatcttgcatcatgctagagtggaaggcatgagaggtatgcaatcgtttgttgatgatgttctgctccgtcagacgctggctgacggcgaggatctccgacgtaggcccggcgataaccgaatagtcaggggcgttaacagcggcaatcgccagcggggcggtaatcagtgcgcgaatctgtgcttcgggcagcgccaccatcaacatggcaccgcttggtgcctgatgcatcagctctgctcgacgcgccaccaagcgcaacgcatcctctaaagagaacacgcctgccaacgtcgctgccacccattcgcccagcgaatgaccaatcattaccgttggcgtgattccccaactgagccacaattgggctaaggcatactcgacgctgaacagcagcggttgtgtgaggcaggtttgcgcaaggcgttcgccttgggctaacgagacttctgctctgaacaactcatggcggatatccagttggtattcacgctcgagtaacgtcgcgcaacggtcgaaggcatcggcgtaggccggccaaacctgatagagctgatggcccatgcgctgatattggctaccctgcccggaaaacaacagccccagcccgagctgtgtctgcgctacaccacgagcaaacggcgctgtcgcggcctgctgcaacagcgtcccggcagcatgtagatctctggttacgagcgcggcgcgatgtgcgaaggctttacgtccctgtgagagtgtccacgccagatcccgcctatccggcagcgattcatgttgcagaaaatcggcaaaacgcgccagccccgaggataaggcactgtcggtcttggcagaaaacggcaaaatactgtaggcaggtacaggcgctcgcgcttgcaagtcaacggctggcgcttgttccagcacaacatgggcattggtgccgcccatgccaagcgaggtgacgcccgcgcgacggatgccgctttccggttgccacggttgacaggtagtgttgatgtaaaacggactattggtcagatcgatctgtgcattgggccgttcaaagtgcaatgttgcgggaattattccctgctgcactgccagcgcggtttttatcaaccctgcgacgcccgctgccgtatccaaatggccgatattggtttttaccgaccccagcgcacagtactgcttttgtgacgcgcccgcaaaggcttggcttagcgcagaaaactcaaccggatcgcccaaacgcgtaccggtaccgtgggcttccacataagtgatatcctgcggtgtcaaacctgccaaccgctgtgcctgagcaatggcgcgcgcttgggcatccacgctcggcgcggtataactgatcttctccgaaccgtcgttgttgacggcaaatcctttgatgaccgcatagatgttatcgccatcacgcagcgcttcatcaacacggctttaacaccaccagccccgcgccggtgccgggcacaaatccgctgctgttatcggaaaacgcccgacagtggccatcggcggcggtgatcccaccttcctgcgacaagtagccggtttttgctggtggccccagcgttactccgccagcaatcgccatgtcacactgccaagtcaacagactttggcatgccacgcacaccgccaccaaggatgtcgatgaggaagtctgcaccgtgatcgccgggccgcgcaggttgaggtgataggcgatggtagtagtgatactgtctttgtcgttaccaatggccgcctgcaaactgccagaagagaaaacgcgtttaaagtgcggcatcaagttcagcatcaaataggaatccatgcttttgccagcaaaaatacccacatcccccggataatcggcagccacatagcccgcatcttcgaaggctgcccacgcggtttccaacaggacacggtgctgaggatccatcagctccgcctctcggggtgcgataccgaagaaagcagcatcaaatttatcgatgtcagctacctcccctttggccttgacgtaatctgggtgctgaacaaattcaggactgattcccatcgccagcagttcctcatcgctgtaaaaggaaatgcactctcggcttgccagaagattttcccaaaacgcctgtaccgtatcggcttgagggaaacgccccgccatcccaatgatagctataccaaaatcattctctgccatgttgctttccccctatattcaggtttatcacgcgtttcattcagtggaatcagtgatgactgtcggttgtggctgcccagcgcgtgtgaccaaaggccaaacgctgcttcgccgcacgcagttgtgtctgatctcctgtggtcccttgcgctgcgtccggggccagcagaaattccgccaagcgtttgatggtagtgaagcgcagcaggtcaaccaacgccacgtgctgaccgcactgctgcccgatgtattgctgcatctgtactagcagaagtgagtgtccaccgagatcgaagaaatttgtggtggtgccgacacgctccaggccaagcaactgctgccagatctccgccagacgctgttccagttcggttgccggagggacatactcgcccggcccttccaactgccgcagatcgaccagcggcaggcactggggatcgattttgccgtttacacctagcggcatggcgctcagcggcacgtagagcaacggcagcatatgcaacggaagccgcaggctgagccatacgcgcaattgctgagcatccagcgcaacgccgttgacgctgcaatagaaggccactagtagcggcgttgccgccgcattgcgtcgcacatcgacccacgcatcagcaatatccggatgctgtttcagtaggctttcgatgtcgcccagttcaactcggtatccacggatctgcacttggcgatcttgtctgccgagatagaacaacatcccgtcggttgcccaacgagcacgatcgccagttttcagcacccgaacgccagggtattccggcaactcgacaaagcgctcgggatcctgtcgtgcatcaaggtagccgggcgaaatgcccagaccagagaaacagagttctccacaggcacctggcggtaccaaacgattatatgcatccaccacataagcttgggtgttctgaatcgggcggccaatgggcaatgctcccgtttcttgctccctacgctttgcgacaggaaagtaggtcgagcagataccgctttcggtcaggccataaccgttaaccactgccatgtgcggcagaagcggcgctatctgctcatactctaacgcttcaccaccgcacagaaacaagcgcagcgatcccatcgactgagccagcacagagaggctggcagaaagcgatggggtggtgctcaggatagtcacccgctgagatgccagcagcgcaatgagcgcatcactatccaaactctgcgctttttgcgccaatactaaggtaccgccagcggcgagcagcggcagtacctccccgacaaagctagcagacgcgactgaggtaatgggtagcagaacatcctgatgcgtcacttgatagctggatataaaggatgcggttaagttgaccagattacgttggctgagtcggacgcctttgggctgcccggtagtaccggaggtaaagatcaccaccgcatcgcaatctaaagcatctggcgcaacactaactggcaggttcggtatttctgtcagcaggctacgccagtcaggcactagcacccaaggtatcgtcagcccatgaggggattccagcggttgcgccaccagcagcatgcacggcgttgcctgcgccaagatcagggcattgcgggccgctggcgcgttaccatccagcggcacatagctcgcccccaaagagaggatcgccaattgtgcgataatcaattcgaaacaaaaaggcagttgcagtgcgacagattctccgcgttttacgccttgcgcacgcagccaagtacacatctgcatcgtggcctgttgcaattcgccataggtcatggcgtcgtcagcgtggcgcaaagccacctgtgtagggcgctgctggcagtgcggtaacactagcgccagcaggttatctacgggcggcagagcaacttcagtggcgttgtgccgcgccagccaagcgtgctctcgaggggtgaaacgaatcaaatcgcggactaactgcgtgggttggctgctggcctcatctagcagttctctccactgcgccaccaggtgctgaatacgatccgcactgtataacccagcgtcgtattcgaaagtgccggtgatgcgcccatcgatatgctgcatacttagcgaaatatccacctgagatgcactggtatccaacaataatggtgtaacgttgacaccgtttagtgtcgggctcgccagaggcatattgtcgagttggaacatgcactgatatattgggaaatgtccggcgctgcgatccacattcactgcgcgcactatgtcggtaaattcgagacgctggtgcctgaaagcggcaaacagaatacctctgatcgtctgtactaactcggaaaacgatgccgcttcgtcaagaggtaagcgcagcggtagtacgttgaccagcggcgcgatcatatgctcctgttctttcgtcagccgcgcagcaatcggcataccgacgatgtattcctgttgacgcgcattacgatgcagcaggaggacgaaggcggtcagcagatagttatacaacgacacgcgctgcgcacgcgccgccgccaacactcgctcgcatgtgttggcagacaatgcgaaggcaacaaacgcgccttggtaacgtgccaccttctgacgcggttgatcggtggggatatcaagaatcggcaacgtccccgccagggtattttgccagtaacgcatcgcgtcctgataggcgtcactctgacgccactcttcttggtactccatgtagtcggcatactccaacaacggttctggcgtcagcgattcaccgttatatgcggcctgcaattcgcgtaacaaaacgcctttcgaccagccatcactgatgatgtggtgcagatgaatcaacaatacgctacgatcgtcatcgagcgtcaacagttcaaaccggcacagcggtgtgcctgacgttaagggcatggggtgtgccgcacgctggttgatcatcgcctgtagcgcgttatcatcactcaccgaggggagtggcactatggtcagcaacgcctgcgacgatacgcactgaggcaccgccaatactggttgtccattgtgggtttccgccatagcacgtaacagagtatgccgactcatcaattgacgaatcgcgccgtccatccgcgtgcgatccagttctccttcaagcagcaaggcggtagggttattgtatagtgcagtatgcggcgccaattgttgcataaaccacatcgacgattgagccgatgacaacggtaggtagcgcacggcgggagtttcacgtaaatcgacgcgactggctgagtacgcccgcgccaagtcgagcaacgttttacgacagcacttgccattgtcggagagtggtaactctgacattgccaacaaacggttcggcagcatgtaggcaggcaagtttttggacagtgcgtccattaaggccgccaaattgagcggcacgctactgacgacaaaagcgtaaatcaactgattgtcgggatcatcctgatccgccaccacgactgcctgctgtacccccgggaaacgcatcgcatgggcttcgatttctcccaattcaacgcgcaaccctctaattttaatctgaaaatcattacggccaatgtaatgaatttgttggctttccccgtcgcgccacaccagatctccagttttatacagccgctccggtttccctaaatggcgcaaagttggatgtatagtaaaacagcgatcagttaacgccacgttgttgagatagccacgtgccagcccgataccagcgagatacagttcgccctcttcgccgtctgctaccggattaccatggtcatccagcacatagagtcggcaaccgtcaatcgcttgaccgatagggatatcgtcgtagtcgtacccgcgcaggcagcggtgatgactgacatcgattgctgcttcggtcgggccatagagatttataagatcaccctgcgccaccgattgataaaagcgagccacactgtggaccgtgagtttctcaccgctggaaaacactaatcgcaatgaggcggtcaaacgaggatcctgtttcatctccagatactcgacaaacaggttcagcatcgaagggacaaagtgcacaaccgacacgcggtgacgctgaatcagtcgagccaaggttcgcggatcgctctccagtccggacggtaacagcactacagatgcgccgtacatcgcccaccagaacatctcccagacagagacgtcaaaggtgtacaccgtcttctgaaacagcacgtcctgagaactgataggataagcgttctgcatccagacaattcggtttagcagcgctgcatgttccgtcgccacccctttagggacaccggtggaaccggaggtgtaaataatatacgccagttgccgcgcatgtggtcggtaacgcagatccgtcgttggcatggcactgaccgccgcgctgtcgatttcgacgcgaggaatcggccagcgatcaccatcgtcagtaccgatcagacaaacagcgccgctgttgctcagtatattttcaatgcggctacgcggtgcattgtacgccagcggtaaataggcaccaccagcttttacaatagcgaaaatggcaatcagcattgccatgccgcgcggcaggcggatagctaccacacgatcctcgccgatccccagcccacgcagataatgcgccagttggttagagcgtgcattaagatcgtgatagctcagcgccgcgtcccccatcaatacagcggctttttccccatattctccggcgatacgatacaaatagtcgactatcgtttggtcgtcggtaggcaactgtctcataatcccttgctgttccataactctggccttcaaagcgagataagtaccgtaaaatggcgtgacgggttacgcctgtccgccgttgtcggaagccaaccgcgcgtggcaggcgtcgatttctgcctgactactgcctttgagttgaaatccctgttcaagaagctcatgcaaaaaagcaatgtcctcttcgctggatgtgccgcgctgctcaatctgctggatgcgctcaaaaaaacgactgagcaattctttcaattgcgcactggcagccacatcggcggcgcggtgatggcgtgtggctgtcagggcgttagtgagcagcgtgatgcgttggcggcgcacggcttccggatcggycttcaccgcctgkymtcccccagcaccaatgctagttgcgcacgatcatgacgattgtcaaatgcgtaaactggtgctggatagcgattctccagcagcaggtttttcagcacactttgcggaccgatctctatcgcgatcggtgacaagtgtcctgtcaggtaggtgagagagcgctgccactgcactggctgagagagctgttgttctagccactggactggcgtgaccgtatcgggatagggttgagcgttgacattggagatcactgggcagcacggacgtcgccattcgcagcgatccagcgccttgcgcaattgctgtccgcaaggtttcaatagtgggctgtggtaaggaacaccaccaatcagcggcactacttcgacttggcgatcatgatccagcaggtattgctcggcggcgataatggccgagttttgtccggataacataaactgttgcggcgaattgaagcaggcaataccgacctgctgtcgggtttcacgctccgccacctcgcacgccgctgccaccagtgcctgattcccttgcttgatgatagtggtactcgcgtccatttcgcgggcgatctcactggctaaacggctacgcatcgccaccagcgccagtgcttgggaaaagctcagcgcaccactacaggtcagcgcagcatattcgcccaaactatgacccaacatataacgtaggttgacatggacaccggtttgcgccaaaaactgctgccacgcgacaaagtgggccacgctggtggtatagatagccagcgccattgccgtcggctcagcaagttgtaccaaagtacccgacaggcacagcgctgccatgtcccgttccgtgatctggctagcttcatcaaacagagtacgcacctgcggataacgctcatacagccaccgtgccatgcctacatattgcgaaccggagccagggaacatcagtgcgacatccttcgtcatgcttcactccccatcatgtaattcatcgcaatttggatttcatgaatttgcgatgtcccttcgatgatttccatgattttggcgtcgcggtagtaacgttcgacggcataatcggcatggcaaccattcgcaccgagcagttgcaccgccttcccggccacgtccaccgcagctttggaagcgacatacttcgccatcaggatttggtttatcatggccgggtgcagcgtttcgcggtattccgccgcgctgaagcacattagttgcgcactgcgcgtttgggtcagcattgtggcaaacaagtgctgaacaatgccatgagaaaataaccgccgcttgaactgtttacgctggcggatgtagcgygttgccacatccacagcggcctgacataatcctaggctgccacaagcggtggtgaaccgcccttcattgagcgcaaaattcaccgccagcggtaccccaggggtgagcggaccgagcaatgcatcctccttcaggcggcagtcattaaaatgcagctctgccaacatattgccgcgtaaccccaacatgtcgttgagtggagtgatagtaaagccgtcggtattgcgatcgataagcactgtcgctaattgattaccacagtggattaaracaataaaaaaatcagcaatctgccctagcgtgatccatttctttttcccgttcagccgccaaccgtcgccatcctgctgtaattctgtttccacgttcactaagtcactgccgatattcggctctgtgagggcaatcgcgccgatcaattcccccgttgccagctttggcaaataatgggctttttgcgctgcgctgcccacgcgttgcagcagcgtgctgaccatgccagtcactgttatgagattttctaacgaaccgtgaaccccagccatcacttcatgcaaagcgcacagttgataagaatcgtaacctcgtccgccatatttttgggggattgacgcacctaagtacccggcctgcgccacgcaagaaataatgtctggcacaataaactgctgacgttcaatattctgtgcagccagggcgagatgttgtttggcaaacaggactgcctcttgctgagccagctcataattttcagtgcacatagtttactccaggcctgtttgtcgctgaatgagctccactattttattgacggtagcaatctgttctgttttcaactcactcacttccagctcaacctgaaaatttttttctataaacagtatgatttgcacagtaaataacgaatggacaagcccgagagaaaaaatatcgtcatcatcgttcaacgtatgcccacgtaatgagcgtgaaagaaattcccgaatggcggctttcatatcttgctttttcatattcatatccctatctggttaacccagaatcactgctcggcgtacgtctgttgatagcgataaaacccctgccctgatttcacgcccaaataccctgcatcgaccattttctttaataaaaagctggggcgatacttatcatcattaaaactttcatatagcacctgcaacgattgcaaaatcgtatccaagccaatcaaatcggcagtttgtagtggccccatcttgtgcccgaagcaggttttaaacaacgtatcgatatcctcagcacgggcgatctgctcctgcaccataaatatggcttcgttaacaaaaatcatcatggcacgattagtgacaaagcccggagaatcattgaccacgatgccggttttattcaactgagcaaataagtggtgaaatatgttcagtgtacgctctgcagtatgtacaccacggattaattcgacggtgtgcatcagcggtaccgggttcataaaatggacgccgactacattctccggatgtcgcattaattttgacaacgcagtgatagatatggcggacgtattaacaccaaacactgtcgacgcgccgcagatcgtattcatccgtgtgtatagtgcattttttttctctatatcctcagtaatattctcaatcaccaaatcacattctacaatgtcgtccaactcagttgtgaaacggatattttccattatctccgctgtgctatgcgtcttttttttatgctgcgggtgaaaattatataagcgtaagttcgcttcgatcatctgtcggcatttatccaactgagattgagaaatatccacaacgttagttgatatgccgtattgcgccatgttatgagcgacgccagttcccattactcctgcacctattaccgccacgttcatcattgagctcctttactgacaggctatttcgaggttgtcttcgccccccagttgcgccgcgatatgcgcgtagatattgcgcggattggggttttccatcagggtcaaaagatcgatatgtacgttgaaatcgcgttctaaacgggaggtcaattgcgtcaccagcagcgaatgcccgcctaattcaaaaaagtcgtcgtccaccccgaccggcgatatttccagcaacagttccatcagacctgtgatatactgcataccccgcgagtgtgcggctacgaaaggtacgcttaacacgggacgtgcctgataagggtggtgcgtttcgggtcctgcttcgggttgggtctccacactacccattacccgtccaggcaatgggtagtggttgtgtgcgaagggatatgctgatgcgctcccgcgttgcggcagcggagtgccgtaccacacggcccaatccacattgatacctgcacaccacagttgcgccacgtagcgcaatacatcaacgtcttctcttatttccggcggcagcctaacccagttgatactgtgaacgccctcccccagttctcgggtatctgccaacagcgcttcactccaaaaccctctgtcgttacgctgtgcatcggtgatgggatttccttgccaagccagcacgtagccggggataggttcatggcgctcaggaagccagagatgaagcgccttttgctccatttcccacagcaaatgcaacacgtcttgcgtcgcaatcatgccactggctgcagcggcaggcaaaaggcctgttccagcacccgacagcagtgttaatgtcggtagcaggttcatccaggtttttagcgcggcgatagtctggcagcctctgattagcaggctgctgttcgcttgtgccgcccacgtttcagcgtggcaataagcgggtggaatattcatgccgtcgagtaatgccgtcagagcagtcgcttcgcgttgataatgtgccgaatgcgccagccactgtgcgtaagtacaatcgttcgtagtacgtagatctggacagtgtaggccccaaggagcgtcgggcattaggttatccagcgatgccagcatcgcttgcgtaccatcgttttccacttgtatcactcggcggcaatcaaacacggggcgcgccacttgttgtgtgtaggctagcgttgacgcatcaagggtagccagcaacggggtaagctgttgcgtcagctcatccaactgctcgaaagacggcgcggagagagggataaacaccggtgctcgcacttggtcatggtcatcgcgcaccgcaggattcagcccttccaaaatcatatgcacattagtaccgccaatgccaaaagaactgacgccagcgcggggcggcatccgcgatgcgggccactcctgcggctgtatcgggatataaaacggtgaatgcgccagatccagcttcgagttaggcatttgatagttggcgagcggcggaatggtccggtgatgaagtaccagcgccgtcttgattaacccagccacgcccgccgccgcgtgggtgtggccaatattcgcctttacagcccctagtgcacagtattggcggtgtgaagtatcgaacgcctccgtcaacgcagcgaactcgataggatcgccaatacgggtgccggtaccgtgggtttcaacgtagccgatgctttctgggcttacttctgccagatgacaggccgcacaaatgaccgccttctgtccctcatgaccaggcgcgacaaaaccgattttttgtttaccgtcattgttgaccgcgctaccccggatcaccgcatagatgcgatcgcccgctgccagagcatcttccaaacgccgaagcacaaccacacccgcgccatcgccaaacagggtgccagaagcctgactgtcaaaaggacggcagtggccatcggtggagtggatcatgccctgttgacagaagtagcctgacttctgcggtaaatcgatagtaattccacccgccaacgccagatcacattcgccaaacaacaagctgcggcaagcgatatgcgttgcactcagagaagtcgaacaactggtgtagagactatacaccggaccgttgagattgagactgtaggcaatgagatgtgcgagcagatccttatgaccatagatgccagactcaaaacgattcagcgcatcgccgccaatctgtgacagcgaacgccgtagccaatccacatcttctgacgcccccacgaataccccggtgatcagatcgctggtacgttgggcatagcctgcatcttccagcgcatggtaggcaacttcatgtaatacgcgggatttcggatccagagtctgcgcctctttgtgactgtaaccgaaaaatgcagcatcaaagtcgcatatgccctcgatatagggcttggcccgtacataggccgggttgtccagagtactctgttcgacgccttcggccagcaactcctcctcgctaaagaaggtgacgcactctttaccctgaacgatgttatgccagaattcgtgtaacgtccgggactgcgggaaacggaccgccataccaataatggcgatttccatgccgttcatttcgcttgcgtattccataaacttcattacctttcttcagggcgaggaggcgcccggattaatgcaaagacgtgtgactgcgcgcagtatttttcgcaatttgcaaagcacgttttgctatctgattcgcgcgcgtattcgtctgtactgcaggctgtggtgatggcgcatttgactcgccctccgggggctggcaaaacgtcgccagctggcgcacggtggcgtggttgtacagcgacaccacgctcacttgcggatagtgacgcgccatttgcccactcagttgcaccatatcgagtgaggttgcccctaattcggcatagttgtcgtcaatgcctactctatccagacccagatactcttccaggatttggcagagcacgcgttccacttcacgtgtcgcggggctgtaaggcacgccaatttccggacggggccgctttttcactgtctgctgagtaatcgtatcgttagcggcagacggtacaccgcgatccacccggttgccccgcgctaatctatcgatcgcccgaggtgagagcagcagttgcgcccacggactgcgagtgttcagtatcggccacaattggcgcatcacctcggcattgctcatgctgagcgcatagccgccgaggcgcctttctgctatcatggcgttcagccggtccatgcctgccgcagtgcgatgcgttaccaccaccttgccaatatgctgcggcgtggtcagggtggcgaaggcgcgtgcaacctcgggcaatggtacggatttgcatggaaggagcggtagcgtgttatcatctatccaagcgacaatctgttgcaggtagcgactaaacgcaccatgtgccgcgtgaaaattaatcggaataaaggtgccgccttgggcgaagaaacgcatcggtagcgctttgtcttccacaatgtccttgctgcccagctcaagaaaacggcccagcggtgccagcagcgcgaggctagcgtcaagcagacggcctgtgagggagttaaggatcacatccatcccctgtccgtccgatgcggtcagcagagtggcagcgaactgttcgtcgtgtgaatcagctacggcatgtacgcctagcgaaagcaagtaatcgcgtttctgctcgctacctgctgtggcgaaaatctgtgctccgcagcgtttggcaatatgtagcgcagccaagccaacgccccccgccgcactgtggatcaatactcgttctccgggttgcaaattagcgcgcaccaccagtgcgtaataggcggtgaggtatgcgataggcagcgcaccgcctgttcgatgcgacaatgggctggttttctactacgcaatcgctttctacccgtgcgtactggacaaaaccaccgtttagcaccgccataacatcctctcccggggcaaattcagtgacatttttacccacgcgagtaatgcgtccggcgcactccagtcccaattgcagcggagcctcacccggctgctgccggagcaatcccgtggtgaacagcacatccttaaagttcagtccggtggccagtacctcaatctctacttgtgaatcccccagcgctaagcgcggcgtagggcacaacgctagctttcctgccccctccccctcagcggccagccgcagttggtagttatcggcactgggcacgcgcagtcgcgtgtcgtcatcgacatcttgtatgtggagctgtaccttgcgcttcaccattgccgcacagcgggcaaccatctcgcctgccatgtcgtagagcgtgaaagcgtagctgtcaccctcctcatcgtgccgattgacagtcagcgccacatgtaaggtgttcggcaacgggcggtacaggcgtaaatcctgataaaggaaaggtaccgaatcagtatgaaaaccaggcagttgttcgacaacactgctggcgatgtccaacagcgcagggtgcagtgcgatcgtatcattagcggcaacggtgggcagggccagcgttgcgaaaacctgagtctgggcggtattgccatacagttgttgtacgctgtgccagcgcggcccatagtggaagtgcgtgctcgataattcctttgttggaggagtgatagtgtgcatctcgcgcatcagccccgtgagatcgcacacaacattatcgtctaccatcagacgcgtcgccctgcctctggcatgggttgttaacgtgccactaaagcgctccgtcattgatttcacctcgacactaactccttgcccgttaggtgaaatgtcaacaaaaacgtcaacactgcagttgtccatcacagtcaacggtgccaaaaagaccaattcatcaatgcagatttggtcttgcacaaagtaatggcgcagagcttcatacgccagcgccagatagccggttcccggcagcgtggcgataccggatatccggtgctcatccagcagccaatcggactcgggggataatcgcgcgtagtagctggtgtcagccccttgttgtttataagcctgtagcaacgttcccgtcatcaatgggcgcagtccacgcaagacatcgtattcactgccgtttatagcatccaacaacatgccctgctcacgcaatgcatccaacccgatactgagcgcattcaccttgtagcgggtacgcagttgctgtgccagtgcatccaaataggcgctggcggtagcatagcctgtctggccgatctccgcattcacggcagccaacgagttacagaacagcagtagcagacgctcatccagcagattccgttgcgctaacgcatgcagcacattagcagtaccccgttctttcaccgttagcgtgtcgcgtagcgcagattcgctcaattgatgcagtgtcaatgtggtggtagcgtcggcagcaaaaatcacgccatccaaccgtccatagcgttcgagcagagttgccagacaagctctaaccgcctccgcctgcgtcacgtcgcagtggataacgtctaatgcgtcctgctgcaccgcttcatggtgataacctgtgcggctgctcagtaccacacggactccctcacgctgagcaagcgcttcgccgatcatgcggccaatccccttttcaccgccgataatccacagtacgttgcccggtatacaccctgtttgagggggtaagtgcgccaacagccgtgtcgggataaagcgtcgcaggtaaagcatcccctgcctgagcgccattaccgtttcttgtttcggggccagacgctgggttagcaagttcagattctcatcactgctctgcgcatcgatatcgatcaatcgtacttcggtcgggtgcagctcttgggcaaacacgtttactgcgcccgacaacgctgccagcgtcggttcgggattatcctcttcctgtacgcgaaacgcaccatgggtcaatactgttaaggacgccagcggcgtggtgctgtgcatacaccagcgagcaacacgataaagtcccgagagcgactgtgtcaacgatgatcctgcctccgcaccgggagcatacaagcaatgtaactgtcggtaggttttgtgtgctaaaagtgcgcagatgtcgtggaaatgcgtcagaatacggtcattatcccacacgtcgtcctctgacgatatcggcagcggcattgtgatgctgtcgacaccactactcatcagcgtctgctgtaacttgtcgccgtcagcactaataatgatgatcaattcgcccggcgcatagaacgcctcccgcaaggatgtgtcgtgcatccgccacagcacacgctggagccactcatcttgcggacggcgcagaggatttggatactggcgataaccggaaagtgcagcaccatagcgatagtaataagtctgttcgaaggggtaatccggcaatggaatgtgcttgccgagtgccgtctggttaaagcgtctccaatcaatattctcccccctgacccacagcgccgccagcgtacgatgcaacatgtgctcatcatcgatcgccgcgttggctttgcgtagcgtcaacagggtgggctgatcgctgtattggttatgtccttgaataaaggtagagagcgtattacccgggcccacattcgataaacagcgtgggttgtaccaacagttgcgccgcaccttcgctaaacagcaccgcgttgcgcacttgctgcacccagtaatccggcgaggtagcttgctcctcagtaatccatgtaccgcttacattagatataaagcgcttgtgcggcgcgtgcatcgggatttgccccagcaactgtgcaaaatcgtgcagcatcggcgtcatcatggccgagtggaatgcgtgagaggttttcaggcgcctgtgctgtatcccgccctcgactaagcgtgtgctcaaacgggaaatggccgcctgctcgcccgcgactacgcaaaaatgcgcgctattattagctgccagttcaataccccgttctgcagctagccatggggtcaactgttcgcgactaaggtagaccgccatcatgctaccgggacgcatggactgcatcaaacgtccgcgcgcctcaatgacgtgcagcgcatcctcaagagtaaatacgccagcaatacaggccgcaacatactcgcccagactgtgcccgatcatactgtccggcgtaatccccagatcaatcaaggtgcgcgctaggctgtattcgacacagaacaacgccggttgtgtgaactgcgtttgatcaatatcccgcgtatcctcatcgtcaaacaacaacgccttgagatcgaccgtcgaatagcgttggaatgcagcaaagcagcgatccatgtgctggcgaaacatgggttgatgagcatagagcgcgctggccatgccgtgatattggctaccttgaccaggaaacatgaagcagatctccgctgtcgtgcgctgaccattgaagatttccgcttgcaatatcgtggcacaggagagatcgattttcgacccacgactcaccaaataagcccgccgatggtcaaaggctgtgcgtccagtttgcaatgtataagccacatccggcaggcgcacccctactccatgcttgacatattccagtgtggaggccacgcgcaactctaacgcagcgggtgttttagcggagaacaacaacagatagctgtcgcgtacccccgtcgctgaagggtcgtcctcatgttgatgtgcttctagtgcgatgctggcattggtgccgccgatgccgaaggagctcaccagtgcacgacgaggacgcgtcgacggccacggttggacttgctggttaacgtacaatgcagaacgcgatagatctatagcaggattgagttggcgaaagtgcgctgttggtggcaacacttgatgatgcagggcgagcgttgttttgatgacgcccgccactcccgcagcggagttgaggtggccaatattacttttcagcgctgaaaccacacaaaacggaacaggtgttgggccaaacacctcattaagcgcacgtaactcaataggatcacccagcaccgtaccggtgccgtgcgcttccaccaatccgatactgtcgctatcaaaaccggcacggcgcaaactggtgcggattaccgttgattgcccgatcacactcggcgcggtatagccgattttgttattgccatcattattgaccgccgaacctttgatcacaccatagatgcagtcccgatccgccagcgcgtcgtccagacgttttagcagcagcattcctaagccatcaccggtgactgtgccagaggcttggctatcgaaaggacgacagacaccatctcgcgcattgatcatgccttcatgatattcatagccccggtacgcaggcatctcgatagaaacgccgcccgccaatgccgcatcgcaatcccggttacgtagtgcgatgcaggcctggtggatagccactgccgaagtggagcaggcggtgtcaagcgtcacggcagggccggtgaggttaagcgcatgggcaatcaatgctgtgacggaatggatattcaggatactggccttgtacagggcggtagagtcggtagtgtcttgcattaccgcattaagccagtggggggatgtcagcagtccggcataaatgccaatcgcaccagtaaaggtggcaggatcgcacccagcgtgttccagagtttgccagcagcactgatgcaataagcgaatttgcggatccatacattccgcctcgttgggagtataaccaaagaaatccgcatcaaaccattcgtgatcatcaacaatccctttggtttttatataattcgcttgtttaagcgtgtcaggtgtcacaccatgcgcgcgcaactcttcatcactgaacagtgttaatcccgattcccctcctacaaccagcgtccacaacgctgcaatattcgccgcaccggggaaacgtcccgccataccgacaatcgccaccggcatgtcgctgtagacaacagcacgcgttggaattgcatcctccggcgatacggcagtatcgagaaaatgtgctaacgccgtgagcgttgggtacttaaagagatcggtaatatcaatctccaagccaagttgccgcttaatatcccctttaaccctgatggtatccaatgaggtgccaccgagggcgaaaaaggaggcattgctatcaatgtcttgtctatcaagtacgcgttgccagatagcatgcagcgcatgttccatgtcactatgcacctctgatatcgtggtggacacggcgttgcactgagttgcgggcaggagataccgcaactgcgccaagtcggccttgccactatggctttttgcaatctccgtcaccaccaccaaggattccggaatagcgaatggcggcaatctgtcagccaattgccctcgaacttccacctcatcatagctatcattgacgcagaccactgccgcaatatgcagcgtttcacgtacgcggtaaggaaccactaccgcctcgataatgccggagcactccagcaggcgctgctcgatctctccggtttcaattcgttgtccattgatcttaatttgaccgtctttacgcccaaaacagtcaacacagccatcatccagcaaccgggcataatcgccagttttgtacatcataccgccgggaataaaaggatcagggacaaaaaccgtcgcacttagcgccgggttgttctgatagccgatggcgacccccactccacccgccactagttcaccggtggcaccgataggcaacaaatgcccatggagatcggtaatgtagagcgaggtgcccggtaccgcgtatcctatcgggactcgggcgggttgcaacccgttgaaacgatatgcggtggtaaaaatagtgttttccgtcggcccataaccgtttgtcaccaccagatgcgggtatttttgcatcacgtcgttgacatgccacgcagatactgcttcgccgcccaccgtaatgtgttgtaacataccgaagaaatcggcaccttctgccacataggagttaaacaaggatgaggtaaaccaggcgcgcgccacctgttcatcagcgatcgtgcggcgaatgtgattgatatcaagtaatgcctgtttgctgagtaatactagtttgccgtggttgagcaaggtagaccacatctcaaacaccgaaacatcaaactcaaatgggcaggtcagcagcgttgtctcaccgctctccaccttcagcgggctgtcgccttgtatcaggcgcaataaaccgcggtgcgccaccgcgataccttttggcttacccgtcgaccccgatgaataaatcacataagcgcgagaatctggtgtgataaccggaaataccaccgagggcgcgacgggaaatgcacagaggtcactctgcgcaacgtttaatgcatctagcggtttgccatgtaccagcaacagcgccaagccgctgtcatcaataatttcctgcatcctacccactgggtagtcggggctgatgggcacataagcagccccgatcaacatgatggcgatgatggcaaccacggtgtttacccggcgttcgctaattatgcctacagtatcgccaaccataacaccctgctgtaccaaataagccgcgagctgctcagcttgtgctgccaactccgaataggtcaacgcgcacaattcatcaaccactgcgacctgtgctggcgaagtcgcagcaacttgatgaaattgttcgatgacgttggattgactatcccaatcccggcatgccatgcgttccagatagggttgaagtacctgcgcctgctggcatggggacaagtttaccaacgcagcaatggggcgctgcggattgtccaccagttgttcaagcagataactcaggtgcatcagcaacgcttgcgccatgttgttggtcaggtagttaagggcatatgcaatactgaaacggaatcccttctgttgagtgatggtcaaggtcagcggatagtgcgtttgttcatgtacactgagatggcgaattgccacgggcgacgcgcatgacaataatgtcatatcaacgggataattctccaacaccactaaggtattaaaaagatccccagcatgaccttctttatgtaccaaccgttgtatgctggctaaggcatcatgttcattgctgtagtgagctattagtgtttggtgcatacgttgtaagtgttgcaacagtgtcgccccatcatcacgcagacgcagcggcaacgtgttaataaatagccctagtgtttcttctataccatcaattggtatatttcgccctgatattgtcgcgccgaataacacatcgtcagcatagcaccaacgttgtagcaggatgccccaggccacatagaagattactgcgggggtgatacgataatcgctgcatagcgtctgtattttctgacacacatccggagacaaattgatctccacatgatttgtttgattaacgtaagaattgttctcggcttcagtatctgtgtgatattgtgacagcggcacgatacaagttggtgttccctcccgaagatatgcagcccaatagtcgtgctgaaaggtgtgacgtcgggccgacagtgtgtctacaaggggtttcagagatgaggggataatggcgctatcatccctcacaccactgaccacagccgctccatagagttggagcaactgtttaatgaaaagggataagctccagccatccatcacaatatgatggtatgatagtataaaagcactttctttcgttgactgaataaggtaggcccggactgggatcgttttcaaggaaaatgggtattttaaatcagcctgtagcagttgaggaattatagcatcaataccgtcatcctgcgggacaggaatgataatgtcatcattagctagtagaaaacgtatttcctcttgctcacagtctaacacatatatatccggcaacacatcggtcttcaccacctgacaagggcgctcatcaatctcccagttataatcagtgcgaaaacactcatgctttcgaaataacgtttccagcgcccacttgaagtgggcgctatctacatgctgagaaaaaatgcatgtaaaatgctcatggtagttactccttttcttatcctttaaggaatggaataaaaacccctgttgacttggtgttagcggtaactgcttacgcgtgtccatcttattacatggaaaatctccagaggtattatccataaccatcaccttattatcggatttatagattatttaacatgattattctaaatggcacacctatccgcaagtatagttttttattgcgtattcatataatcatattgcattttatcacttacaggaatacccccaaaaaatccttatattctgattacatgtttttcttcaatgaattagattctgtctgtaagcaaaaacatgtaagtcatgcagtacatacatgatgtagcgggtatgaattgatacagccaccacatagaaaataatgcgtaattcccatttacataaaaaccgttgtatcgtaaattcctcttaaatactgccaaaacaacagatacacagatacacagatacacagatacacagatacacagatacacagataccattcaggatggggggaaacatggataagttcaaagaaaaaaacccgttatctctgcgtgaaagacaagtattgcgcatgctggcacaaggtgatgagtactctcaaatatcacataatcttaacatatcaataaacacagtaaagtttcatgtgaaaaacatcaaacataaaatacaagctcggaatacgaatcacgctatacacattgctaacaggaatgagattatctaaatgaggattgatatattaattggacatactagtttttttcatcaaaccagtagagataacttccttcactatctcaatgaggaagaaataaaacgctatgatcagtttcattttgtgagtgataaagaactctatattttaagccgtatcctgctcaaaacagcactaaaaagatatcaacctgatgtctcattacaatcatggcaatttagtacgtgcaaatatggcaaaccatttatagtttttcctcagttggcaaaaaagattttttttaacctttcccatactatagatacagtagccgttgctattagttctcactgcgagcttggtgtcgatattgaacaaataagagatttagacaactcttatctgaatatcagtcagcatttttttactccacaggaagctactaacatagtttcacttcctcgttatgaaggtcaattacttttttggaaaatgtggacgctcaaagaagcttacatcaaatatcgaggtaaaggcctatctttaggactggattgtattgaatttcatttaacaaataaaaaactaacttcaaaatatagaggttcacctgtttatttctctcaatggaaaatatgtaactcatttctcgcattagcctctccactcatcacccctaaaataactattgagctatttcctatgcagtcccaactttatcaccacgactatcagctaattcattcgtcaaatgggcagaattgaatcgccacggataatctagacacttctgagccgtcgataatattgattttcatattccgtcggtggtgtaagtatcccgcataatcgtgccattcacatttagagatcatccggcataatcaatctgccaacgaaggagagcgctatgcgtaaagcccgttttactgagcatcagatcatcgccgtgattaagtcggttgaagccggacgaactgttaaagatgtctgtcgcgaggccggaatctctgaagccacctattacaactggaagtccaaatacggcggcatggaggcttctgatattaagaaaatcaaggatcttgaggacgagaaccgccgtctaaaacaaatgtttgccgacctgagtctggagaaccgggcgctgaaagacgttatcgaaaaaaagctttaaaaccagcctttaagcgtgagctggttactcatctgataacgacgttcgaactcagtatccgtcaggcctgccggagtctgaacctgagctggtctgtcgattttatgcatgatgccctggtctgtggccgtcgttttcgcatgttcaatgtcgttgatgattttaaccgtgaggcattgtcgattgaaatcgatctgaatctgccagctcagcgagtggtccgtgtactcgacaggatcgcggcaaaccgtggctatccggccatgcttcgtctggataacggcccggaatttatctccctggcactggctgaatgggcagagaaacatgcaataaaactggagtttatccagccgggtaagccgacgcagaacgctttcattgagcgctttaaccggacataccgaacagaaatactcgatttttatctgttcagaacgctgaatgaagtacgggaaatcactgaaaaatggttatcaaaatataactgtgaacgcccgcatgaatcgctgaataatatgacaccggaggaataccgacagcgccattatttggccgggatctcaaaaagtgtatggaactaaaatgggtctatttacactgctgctacgataatgcctgcgtggaaagcttctttcattcactgaaagtggaatgtctccatggagaacactttatcagccgggaaataatgcgggcaacggtgtttaattatatcgaatgtgattacagtcgctggcgacggcacagttggtgtggcggtctcactccggaacaatttgaaaaccagaacctcgcttagagcagtgtccatattacgagggtaggatcagtcgtttctttcgcggtaactttatatgatcgctgtgtaccagcatcgagagaagaaattcaggatgtattcaacactgagttcacaagctctgtagctattaagtcagtattatttacgtttacgatacatgttattatcgcaggatctttatcttggtagtgatactgcgagtggatacacccccactcagtatcttctataactatggcttttggttcttcaggcatcataccttccataacacgttcttgatggatacgtaacttgtagtacttctctggagatgaagaaatttcaacgagtacagattgtagatgtacgaagcctagaaatttaaaacactcggattttgtagaggattttaatgataaagtccagataacaaacacgttattggaaccatcaccataatttttagtgtcaatcttatctaccagctcctcgttgattaacatagactgatttagcaacttccgcttcacgccctgagcggactgttatcgctctttagacacagttccactaggggagaggatcagcgcttcccacgtagggacactatagtaactatcaccacatgcagtagggaagctcaaaccaaatttatgtagccagctcctattggtggtcattctggtggtcttgacaggaagataactctggtttagcttacttattagccacttactggcaaagg

SEQ ID NO: 58 - DNA, 8249 bp, Escherichia coli
aaccaaaaagggaggtgacaaacttgcatctggagttgtgaaagctgtttataattccgcaacagcaggctgggaagaatcaatcgcggtccaggggagcatcggtggatttgattatcgcatcaacggtagttattctgatcagggcaatcgtgatacgccggatggacgtctgccgaataccaactatcgtaacaatagtcagggtgtatggttgggttataactccggaaaccatcgttttggcctctcgcttgatcgctacagactcgcgacgcaaacttactatgaggatccagacggaagctatgaggcatttagtgtcaaaatacctaaacttgaacgagagaaagttggggtattctatgacacagacgtggacggtgactatctaaaaaaaattcatttcgacgcgtatgagcagaccatccagcgccaatttgccaacgaagtaaaaacgacacagcctgttcccagtccgatgattcaggctctgaccgttcataacaagactgacacccatgataagcaatacactcaggcggtcacattgcagagtcacttttcgctgcctgctaataatgaacttgttaccggtgcacagtacaaacaagacagggtcagccaaaggtccggtggcatgacctcaagcaaatctctgaccggcttcattaataaggaaacacgaactcgctcctattatgagtcagagcaaagtacagtctcactattcgcacaaaatgactggcgattcgccgatcactggacatggacaatgggagttcgccaatactggctttcttcaaagttgacgcgtggtgacggagtatcatataccgcaggcattataagcgatacctctcttgccagagagtctgcgagtgatcacgaaatggtaacatctacaagcctgcgctattcaggtttcgataacttggagttacgcgctgcgttcgcgcaaggctacgtatttcccacactctcccagctttttatgcagacatctgcgggcggcagtgtcacatacggaaatcctgatcttaaggctgaacactccaataactttgaattaggtgcacgatataatggtaatcagtggctgattgacagcgcagtttactactcagaagctaaagattatattgcaagtctgatctgtgatggcagtatagtttgcaatggtaacaccaactcctcccgtagtagctactattattatgacaatattgatcgggcaaaaacatggggactggaaataagcgcggaatataatggctgggttttctcgccatatatcagtggcaatttaattcgtcggcaatatgaaacttcaacattaaaaacaactaatacaggagaaccagcgataaacggacgtatagggctgaaacatactcttgtgatgggtcaggccaacataatctctgatgtttttattcgtgctgcctctagtgcaaaagatgacagtaacggtaccgaaacaaatgttccgggctgggccactctcaactttgcagtaaatacagaattcggtaacgaggatcagtaccggattaacctagcactcaataacctgacagacaaacgctaccgtacagcacatgaaactattcctgcagcaggttttaatgcagctataggttttgtatggaatttctgatgacaaaaacaatcgttatggaattctttgtcctgatctgcccgctttgcgggcaggctaacgaacgtattgtgtttgttgaaggtttttcgacgttgttttccatctgggggtgaatatttattcttcccgccagcatgactctatagtcattgctacgacaatgacttataaagctggttactgagcctatacctttgtaattcaaaagtgatatcagttcacaacgcaatactatttttagattatttactctcacccagatactgaatcaatggataataccttttgatttatcccgactcggaagaaggtgggataaatattctccttctattgccccttactccaactatcatattttacaatatcaacgaaccgtccatgaagggctgaaattctcttcctgaaacagctctgtcagcccgctaatctgtttcagcctcagcacttcatcctggtccatgcccaactctgtgccaatacgctcatctgtccagcccagacgcgaaaggtccctgacaatgtcagacattgacgttatctggtgttttcccctggcacggttatgccgtatggttgcggcaatacgtgatgcctgtccctttctttccggattaatacaggtcactggcagccagcccttcagacgttttctcgtatccgctttcctgcccagcaactgacgatgaaaaccatccacgaccagataatgctccttctcttccgaaaccaccacaggctgcgtgaatccatcctgctccagtgaatgtttaagcagttttttttcactggaagacatgacattgggattgtaatcgttggccaccacctcatccgctttcacccacaacacacagtccacaggctcctgtgcaaaagggctgacctcatgcaacaccctgcgcagatgattaagggctcgtatggtctcttcttcagatcgttcctgactgaagtactgtcgaatcatgttgctcaatacttccacctcaggtgtcacagaatcccccattccttcctcctttctttcatacgctgcagataacgttcatagtgccggggtttgttcggactgaaggagagggtccggcaccagaaatcattctttatgagtgtcttacagatacgtcgccaagacgggatatcccggctccccaggtcattctcctgttcatccgggatgtcatccgggaagccccgcgtctgataccagcgcaggtagacagcaattttattacggtaatgttctgccgttctttccggcatcacatccagcaggaacatcgcatagctacgccaggtatgatgaggcggcttcgtgatacgcttacgcagggcaaaataggcaccgctctcattggcataaagcgccccgctggcagcacccgacacccgctcacacatcctggcccaagtttccggctccagaacatggtaaagccacagtcccttacgctgttccgggccaaaaggctcacagacccgcatgttgcgtaacggcacgccggcacggtacatcaggtcatacaggggattgtagatagctcgggttctggcgttatatatccatatatcacgggctttccagtcatacaacggatacaaggtgtaataaaacccttcaggtgacgctgtggtccagggtttatcatctgcatatctcagtttgcgctgagacaccagtcccataaagcgattgagcgattcatcagcacgaacaccagtcagtattgccactccacaccggttaccggcaaaccaggaagaaaatgccggaacaaattcttcaaacgtcatggcataccgataaaatgggaaatacgacatatctgtaatagcgtcatctggtggctgacgaacccactccacacctggttcccagcatatccattccggctgaaactgagagacaccgtttaccgtagtcagggggagtgccacccagtaaaaagtctccgtcacatcccgatacatctccctcatcttcagaatgtgtgcaattgtgcactggtactgagcttcccagtcaatgaataatacagagaaacgacgtttcttcctgcgagccacatcggccgtaagatggagcagcacagtagagtcttttcctccagaaaaagacaaacaaacagatgaaaatgtctcaaacaaccactcaatacggtgaatggccgcatgtaatacattaacatctgttcttatcttctgtatggttcccatacatatcctagtataaactatcttggcagtaatattctgaactacaaacttaaaccttctcatcaagaaaaagttctaccttaagggtatattgttactatcacgagttcatgatagttaagtttttagtaaaacacgacatatgacgatacatatattagcaaaattatgacaaatgaggctaccttaacaaaaattcattaatagcaaacacataaataaagactctcctaccaaaaaaacagactcttcactccttcttaactattttcatgagaaataataaacaaggaatttattacctttgaatacaaacttatatatacaatgaacttaaactcttgaatcattatccagagaatatcattaattggtgatgacctagctatgcatggcagcattcatgataatgagtatatactagccagaatgacacaaagagatatttaactaactaatatattgatagtcaatgatgacagatcgtagtaatatattaatacttagccctctgaaatatcaagtcatgtacgatgctcccgttattttaatttcgttctagctgtacttttgaatacaaccataactgattattgccaactgactgaatgaaaaatatcaataaatacaacaaacttactgccttttcgttttatttataagacgttccaactacaagaacaatataggcacatgattattccaacaatactggacaaaaactcccgtatctgaagatacaataggtgataattctttcaggattttgctcaactatggcctgatgggagagtcatgacggaactaaggcctttacaagccagaagattagtcttaatgcgatcacagttcaacttgctacgactgaaatccgtaatagcatataaactctgtttttttaacagaaatgaagatcttcttgttgcataaatgatgcttctctgcctctgaaaaagtaaatataaagtatatttaataagattaatttttatgatagtgataatttatgatggggattcatatggcatatctaaaaggatagattacatgttgaattctacaacatcttcgggaaaaagaaccggcattttagcaattggtgcccatcctgatgatatagaattaggatgtggtgcatctctttcatattattctaatgaaaaagtatatattatatctgttgtcatgacacctggttgctgtggcgcagagtatattgatcgtcacaaggaatcacaagaagcattaaatatgttaggatgcaataaactaatccctctaaattttgaagataccagattatatttgcaaataaaagagatgatatcatctctggaatacataattgagaatgaaacgccccaggatgtggaaattactcgagtttacaccatgaataatactgacaggcatcaggatcacattgctgtttatcaggcatcaatggttgcctgtcgttatattcctcaaatactaggatacgaaacaccaagtacatgtctgtcatttttacctcaagtttttgaatctgtagatgaggtccattttaataaaaaaatattagcattacaaaagcataaaagccagatccatcgaagatacatacagccagaatacataattgctcaagccaaattccgaggacaacaggttagtcattctatgtgtgaaggttttgttgtccataagatggtgttgtaacggagtaatagaaatgaaaactttgttatttatcttcatgaccatagcaatgttgctatggtttttaagtacgctaagacgtaaaccctgtcaaaagaaaggctgtattgacgccattataccagcttataacgaaggcccgtgtctggcgcagtcactggataatctgctgcgtaacccttatttttgccgggtaatttgcgttaacgacggatccacggacaataccgaagcggtcatggcggaagtcaaacgcaaatggggcgaccgctttgttgccgtcacgcaaaaaaacaccggtaaaggtggcgcactaatgcatggactaaaatacgccacgtgtgatcaagtatttttaagtgatgcagatactttcgttccacctgataatgatggaatgggctatatgctggcagaaattgagcgcggcgctgatgccgttggcggaattccctccaccgcgttaaaaggggcaggtctgctgccacatatccgcgccaccgtaaagttgccgatgattgttatgaagcgcacgctacagcagtttctgggcggtgcaccgtttattatcagcggtgcctgcgggatgttccgtactgatgtattgcgtaagttcggtttctctgatcgtactaaagtcgaagaccttgatctcacctggacgttggtggcaaacggctaccgtattcggcaggcgaatcgctgcatcgtatacccacaggaatgtaacagtccgcgtgaggagtggcgccgctgcggcgttggattgtgggctacgcggtctgtatgcgcctgcataaaagacttttatttagccgcttcggtatcttcagtatatttcctatgctgttggttgtgctttatggcgttggtatttatctcactacctggtttaatgaattcatcaccaccgggccacatggtgtggtgttggcaatgttcccgcttatctgggtcggcgtagtttgtgttattggtgcatttagcgcctggtttcatcgttgctggttgttggtgcctttagcaccgctttccgttgtgtatgtattattagcttatgccatctggattatttatggacttattgccttttttactggacgcgaacctcagcgcgacaaacccacccgctattccgcactggtggaagcgtcaaccgcttattcccaaccttctgtcacaggaactgaaaaactatctgaagcttaatgctaaagagaaaaatgttcagattgcagaccaggtgattattgatgaaagtgccggtgaggttgttatcggcgcgaatacccgtatttgccacggtgccgttattcaggggccggtagtgattggcgcaaactgcctgataggtaattatgcgtttattcgtcctggcacaataatcagcaatggcgtaaaaattggttttgccaccgaaattaaaaatgcggttattgaagcggaagcaacgattggtccgcaatgctttattgccgactcggtagttgcaaaccaggcatatttgggcgcacaagtacgtaccagtaatcatcgtctggatgaacaacccgtgtctgttcgaactccagagggaattatcgctaccggatgcgataaattaggttgttatatcgggaagcgttcacgccttggtgtacaagttattattttgcctgggcgaattatttctccgaacacacaacttggcccgcgcgtgattgtagaacgtaatttacctagtggaacttactcactccgacaagaacttatccgtacaggagattaaaatgataaagcatacgttattagtgccgtttttttttagtgcattgcccgcttatgccgggttaacttccattaccgcgggctacgattttaccgattattctggcgaacatggcaaccgtaatttagcgtatgctgaactggtagcaaaagttgaaaacgcaacgctgctttttaatctttcccaggggcgtcgtgattatgaaactgaacatttcaatgccactcgcggccagggtgcagtctggtacaaatggaataactggctgacaacccgaacgggtattgcctttgcggataatacgccggtctttgcccgccaggattttcgacaggatattaacctagccctgttgccaaaaacgcttttcacgaccggttatcgctacactaaatattacgatgatgtcgaagtcaatgcctggcaaggcggcgtatcactctatactggcccggtgatcaccagttaccgctatacccattatgactccagcgatgcaggtagtagttatagcaatatgatttccgtgcgtctgaaggacccgcgcggtgctggttatacgcaactatggctaagccgcggaacaggtgcttacacctacgactggacgccagaaacacgctacggcagcatgaagagcatcagtttgcaacgaattcaaccgctgactgagcaacttaatctcgggttgacggcaggtaaagtgtggttcaacaccccaaccgatgattataacggtctgcaacttgcagcccacctgatctggaaattctaggcagcagtctatcagtatattttattcggtagttttcagagaaaagctataactcggtttgataataaacaatataattaatttcgggcaataacttattcgtatagagcaccagagaaaag

SEQ ID NO: 59 - DNA, 12856 bp, Escherichia coli
aggtatccccatcgtttaccagtccagcacatcttgtggtcagacagaagaagagcaaactgttactggactcactgcatgcatggtggagaaaaatgccacgctatccaaaaatccagactgggtgaatggttcagctgtgtactgaatcagtggggcgcactctgttattacagtgttgacggtcaggcggaggcagacataatgccgcggaaaaagccctttgtgccatctgtctcggaaataaaaactttatgttcttcggcggcgagcgcagtgcactgttgtatgggcttatcggcacttgccttctgaacgacattgatccggaagcgtatctgcgccatatcctgagcgtactgccggaataaccttccaaccgtattgatgaactcctgccatggaacgtagttctcaccaataaataagcatcaatatgattctccattaacgcttaccttttctcaggctatttttgcttttttttgcttttccccgccactttatggtgattatcacatcaatatacatcgatagatattaacgtaactgaaatgaggtgaagcatgaaatttgaacgccatcatgaaatattgaaacgactcagtaaattcggttctgtaaaagtatccgatctgtccaatagcctcaatgtaacgaaagaaactattcgatcagatcttaatgaacttgccaggcttggctatctgactcgatgtcatggcggtgcttttatcgtcctagactcgcttgatactattgcgaaaaatgaaatcgcttatgcgcttgaaaattatgatacagcccagggaataaaaaaaggccactcaactatgaaaagtcaagtatgcgttattggttcgtttaatgttgatatcatcagttatttgccgaggcttcccactatcggagaatcgcttctggcaagtaattttatattttcaccggggggaaaaggctgtaaccaagcgctggcagcaagctttgccgatactgatgtttatttcataacaaaagtaggtacagatcactttagtgattatgcgatcaactttatgaattcgtctaagatttataaaagtataatttatcaaacgaaagaaacgcaaaccggaactgccacgatccttgttaatgaaggtactggcgataatgttattgcgatctatcccggtgccaacatgacaatgtcgtccgatgaaataactattcagaaagaagcgattattaattctgatgtcatacttctgcagctcgaaacaaattataccgctctgcaacaagcgatcacattggcgcaaaaaaacagtatcccggtcattattaacccggcaccctataatgatatcgtcaacgaacttattcaggatgttgattatatcacccccaatgaaacagaagctggtttactgtccggcatagacgtacacgatcttgaatcagctaaacgagctgcagaagctatccacaataaaggggtaaaaaacacggttatcacgctcggtagcaagggctcgctcgcatttgatggcaaaaaattcattcattcgccagcgtttccagcggtcgttaaaaatacggcaggagccggggatgcttttaacggcgctctggcatcaggacttgcgaaaggaaaatcactggaatcagcactgtgttatgccagcgcctttgcatccctagcggtggagacaagcaatgcttccgacatgcctgaacatgaatctgtgatacatcgaattcagagtatacattatcagcaaactatttttacgcattaagaagggacagagaatgaataacaccaaaaaatcactaaaagtgctctttattggggaatcctggcatattcatatgattcattcaaaaggatatgacagttttacctcaagtaaatatgaagaaggtgcgacctggttactccaatgtctgaaaaatagtcaggtagatgtcacctatatgccagcacatacggtacaaattgccttccctgaagatgtggcacagttagaacaatatgatgccatcgttattagtgatattggtagtaatactttcctgctacaaaatgatactttttatcaacttcgcataaaaccaaacgctctcgaactgattaaagaatatgtgaataacggtggtgggttattgatgattggcggctatctctcattcatgggaattgaagcaaaagccaattataaaaatacagttctggctgatgtgctcccggttacgatgttagatggtgacgatcgtgtcgaaaaaccagagggtgttattgcacagccatcacaacctgaacatccagttattaaagggttctctgaatatccttttttcctaggttataaccgggcgatcgctaaagaaaatgctgaggtggtattaacaataaacaacgatccattactggtctttggtaactatcacaacgggaaaatagcctgctttatgagtgactgttcaccgcactggggtacacagcagtttatgtcctggccgttctataccgcgttgtgggtaaatatactgactcatattgcaagataataataatggggtaactccagttaccccatttactataatagaaggattgatgtatgaaaaagaataagtactcaactcccttatggatgcttgccacgattcttgcgggtatgctctcccctatgcaatcagcggtgaatggtcaattaggtcactggttacaggatggtaatgcatgcgcagttatctcctttgccagtggtttagtcgtgatgttttttattattatggcgcgaaaagaaacccggcaacaatttgcggcaattccttctctgattaaaaaccgaaaagttcctctctggaactggtttgccggtctctgtggagcgatggtggtattttctgaaggcgcatcagccagcgcactcggggtcgcaacgtttcaaaccgcactgatctccgcgctattgctgtctggtttactttgcgatcgctttggtatcggtgtcgacgagaaaaaatactttaccccttatcgcatcatcggtgcattatttgcggttattgctacgatttttgttgtgtcaccgcagtggcattctacctctttcatcttacttgccattcttccgttcttagctggtttgcttgcaggatggcagcccgctggaaatgcaaaagtagctgaagctacgggatccatgctggtttcaatcacctggaatttcatcgttggattttgtgttttaggcacagcgctagctattcgtgtcgcattagggcacgtcactgttcaattaccagatgtctggtggatgtatcttggcggcccgcttggactaatgtctatcggtttaatggccattttggtcagaggtctggggttactgatgctgggggttgcttcaacggcgggccagttactgggatcagtattgattgacgtattaattccatcgctgggcaataccgtttatctggtcacgatcatcggaacactgtttgcactggtcggtgcaattgttaccactattccggaatacagaacctcgaaaacaatgaagaaaatggaggtataatcatgaaagattatctacaaactgtgacgggccccgtcgcccgtgaagatatggggctaacacttcctcatgaacatctgttcaacgatctttcctctgttgtggatgctccttgctatcctttttcacaacggcttgttgataaaaaagtcacggcagaaatccagtgggcattaaaacacgatccttattgctgcgctgataatatggaccgcaaacctattgaagatgtgatcttcgaaattaataactttatctcgctcggtggtcgcaccattgttgatgccacagggtctgagtctatcggacgagatgcgcaggcattacgagaagtcgcattaaaaacaggtctgaatattgttgcttcctccggtccctacctggaaaaatttgaaagccagagaattcataaaacggttgatgaactggcggcaacgatcgataaagaattgaatcaagggattggcgatacggatattcgtgccggaatgatcggtgaaataggtgtctcaccgacatttaccgaagccgagcataacagcttgcgggctgcctcgctggcacagattaacaatcctcatgtggcgatgaatattcacatgccgggctggcttcgtcgcggtgatgaagtactcgacattgtgttaggtgaaatgggcgtctcgccaaataaagtctctctcgcacactcggatccgtcaggaaaagacgtggcgtatcagcggaaaatgcttgataagggtgtctggctggaattcgacatgattggcctagacattaccttcccgaaagagggaatagcgccaggggtgcaggagactgccgatgccgtcgctcatctcattgagttgggatacgccgatcagcttgttctcagccacgatgtcttccttaaacaaatgtgggctaaaaatggcggtaatggctggggatttgttccagatgtttttctggcctatctggcggagcgcggcgtcgataaaacgatcctcaaaaaactctgtatcgataatcccggacgattattgaccgcataaaaccattatcccccggcacactgcgccgggggatgtcaattaataccccgccgttaaatcatccaccaagcgcgagtcggatgcgccgtacaactcaccatccgacccaaccataatgctttgcgtgctgcccatcgcctcattcagcgccactttctgaccttttgcttccagcagcttgagcgtatccggactaaacccttttcaacacgcagctagtccggcaaccactgatggtggaaacgaggcgcattggtcgcttcggcaacattcattccacaattgatgctgttcaccaccatttgcagcacggtagtgatgattcagctaccggtaacaaagtgagtacataaaggccatactgtcacgaacagtgcaaaagtggctcttccgcaacctaggtgaagattttcatgccagtggactcattaccctccgcctaagtagttcaaatccggctcgaccatacatctggcgtatcagcaccttcaggcgatttacatgaccttcgacaacaccattactccagcgactgctgattgcctcacatatagccgcagcatcagcttccatccccgcagctacgcaccgaagttctgctgagccgctttcgtgaactcgagtgaaccagctgcttagctgtgatttattttaggttttcagaatacggtagaactcgagtaccagttgctgtgctattttcaactccggttctttttcacacatcagactaataaatcgggatgcataattttcttcgcccctgattattctccagggcatcaaccagcggcttacccgggacactgaaggaagtcttgcggcagtagtaaccggtgggttccagcctttacgccatttggcaacagtatccctgacgatggtttcactgcctgtccccccctgggccaccatttcccgccatatccggctggcattataattaccactttctcgttgctcttttaaccactccctccatgggtccagaagccctcgctttggaggccgggttgacatttcagggaatgttcctgaacgcacccagcgactgactgtcactcgcgacaggcctgtaatacgggatatttccctgaaactacatcccttgttatgcagggccataacctctgtccaatgctgatgccgttttttgcgggtttgctgtttaaggcgttccggacgacggagcgatgctacaggcacagatatttctggctcaggtgatttattcagtgataactctctgacaacaagacgtatcagaggcatatgtctgtacatcattcgttcaggctcatcaccaatactttttagcaggtgccatcgatcggccacctgtctggcctgaggtgcaccttcacgtgctgctgtcgcatagactccactgcgatcacgcgagacaacctgtatttccggatattttctgaaccaggtcgccagcgtacgctgatcacggccgggaagcaggacgaggggacggtgagtatcaagattgactattaacataccgcagcagtggccccgatgccacgcccactcatcaataccgacatgaggcgcgcctgactgtttcgtctccggggtattgataaccctgcgaagaagagtatcagcactgcaacggagacccgctgccgttgcagcccgttttccagcctcacctccagctattaatcccagttgacgttgtaaattttgtaacgcctgtgaagactgctggtgtgaaccggcgaagggagcaagcgactcggcaaaaattttacgttaacaagccgggttacggcagtaccagtggcggacggaaaatacaagccatagcgtctgccctgagcagggtagatgctgtatccggcgccgacgacaactatgaacagagtcgctacgcttaaagcattcaggacattgtgctgttttgcgttttccgtggagatggagggttataccgtcagagctaataatttgtcgactgcatcgccatccgcaaggtaactgtagaagtgtcttaagagagtgcattgcgttgcccatracttaaaacagcttagatccttgttcgccagaaagtttcatccattttcttccacccaggttgcggaagaaccacttttcatccgtcgttgacagatgtgaagtatgcgggagaaaaagtgaatatctaactgtaataactcagaccggtacgagtacccgggacgtctacaatcattcagggcaaagtgctaaaatttctctatcccgggatgcccctaccaacgcagcactcccggagatatcattacagctctacaactgatttccgcgactgaaccgctcagttcctatccttccagttgccttcctgcagccccccctccctgctgtataccccggtaccacaacgcgggcagcacttttctccttcataatcttcgtcacacatcacacaaaaccactttctcaccttcaccgtataatccggaaccgtcataccctgcagatgcaaacgacgggcctctttctctgccgggtcaagccaggtgcatcgcagcaggattttctcagcgacagtcatctggtcatgttcaaaccacggtggttgtccgtcattgccccgctgaagtgttaacgggcatccacaggacacacagcacaaaacgtcctggcggttgtgcttcgctgcttctttcgccgtaacaaaatggcctttgctgtcattcgccatataacagttcagaattcgcatatttcctcctgagttgtccggggaatactgaatcctccggtctggcagtgtgtgcagtaccgctccccataataatcgtggtgacattgtctgcagtgccagctggctttacgcaccacgggtaaggcatccggtacgaattgctgcagacgtttaatcaactgtatttctctgcgctccggcctgacataagggcactgttgaccgtgctctgtcagcctgtcgtcagtgtgttcaaaccagggaagttcagtgtcgtattgcggatggtatctgagtgcactgccacacaagtggcaggtgtagtgagcataaggtgcggcctgtacagtacgggcgcccgtcagacgtccgttgctatcaagagcgagaaaggattttgcgtacatagtatatgttccttaccgtcagacgacacgcaggcaacagccgtcccggtacgggcagcgtggtcaggtgtgaatggcggtttcagttcagtctcataagggaaaatcagtgtggtggccatgaacacgtcatcacactgaagtcagataactcgtctgtctggctcagccacgactgcagccaaagttgcgctcaccggtgcagtgagctttggtatgctccttcgccagatagtcagcacgttccagcacttgctgaaagccggtgtcatcattacgcgccagccacaccgccggccaggccggaaaatgcaccagcgtggcatggcatccggcatccacccccagggcactgcaccaggcctgttcaatcattccggccagtgatcccggagcgcggtaatcaccggcacgacaccaggtatcccggttgaccagcagcatcagatgatagtgttttttacctttgcactccccaaactcccgggcccagacgtaatgcagagtggtgggatgcacgcgtttaccttcccgatgcttacgtttctggtaagcgtcgattcgggctttcagggcattgatgaagcgggatatcacagctgcgtccgttgctgccggtacatccgggaaacgcaggtcaacccgcaatgccgtcaggcggggatgaacattcagtgcgtgccgcactgtctcacgaatacgttgctgccagaaggggttgtatttgtaggtcatggttaaatctccgtatggttcatacggaatagccacgtcgtaaaaaatgcgcagagtccctgaagtgacctccggcagggcactgtctcaggcactctgtgataacccgaacggtcgtctccggactgacggttgaattttcagcgttgtttttttaatgtaaaaaaccggttacgggtaaggctgtgaggagggagtgatggtgatacgcaaaaagaagtgcagggactgtggaaacgcgattactcataatacagtgtgttgcccgtattgtggttctgtcgaccccttcggctattaccggaatacagaccgtatcgttaccatactgctggcactgattattgtggtcctgctgactactgtcagcgtcagtgtgtatatactgtgtagctggtgagataacggttcatgtatcccctgagctgacagtgtaccgggtatattaagcgtaaccgacaggttctccttcataccatattaaatttttccaggtattgccgctgccttatttcgtcccatacaggaaaactcgtctgggtttctgacaaatacgcgaaactcacagcccctcaatatcaaccacacgccgtaagccggtaatacctgaaaatcagtctattaccgcccgcgcctccgttaccgaacgctcaggtgacaagactgaagccagcacgcactcgtaaaatttgcggtcagttctgccagccggttgtcaacggcagagttaaaggcttccagctccgcaagggtaagtttataacgcgtgtgggaattcacttttcccgcgtctcctgacgtattacgggctgccacttacctggtgtcccgcaatacagccttagtgttccgttatcggggatccggacgcaccgcaacaaccggggaagtatttctggttagagcagtgtcaagagggatttctcagcccctcactcaccggctcagtctcagggcaggagcattaatacgctcagttcatgtcttatacaggaatgggcatagggggagctggcgtgtcactgctgattttacgcatcagcgttcatgtatttgcactctgatacagaatgcttcacagcgctctgttaccggagagatttactctcttaggttattctggcaaatcctttacgttactctctgatgacttcttatatttataataccaatcagacaaccttatcccatcggtgatatcagtctcctgctcgccaggaacgggctgactcactgtaaccacctccgaaaacaactctgcaattatcagaacgcctgcttctctccctgtcctcacgaaaactatcccctctttatcgcgcgtgcgtgcggaagcatcttttcgcacccccgttactttattcgtaccccttataatggggtgttagccagccagacccggcatgattactgcccccagtcgtccatgatccggggggtgatgtcaccgggtctggtggggcgctggtaaccgctaataggggtcaggtcaggcacttttgccgggaccgtctgtaacgtggatgccggtacctgctccccgtggttatctggttaacccatatacaagggagacagaatgaccgaatccagcgattacgaatccgtccaggtctttatcggcgttgatgtcggtaaagatacgcatcacgctgtagccattaatcgttcaggtaaacgcctgttcgataaagcattacccaacgacgaaaacaaactcaggtcgctaatatctgacctgaaacaacatggtcagatactgctggttgttgatcagccagctaccatcggtgcgttacctgtcgccgttgcccgctcagaaggagtccttgtcggatacctccctggactggccatgcgccgcatagccgacttacacgccggtgaagctaaaactgatgctcgtgacgctgccatcattgccgaagctgcccgtaccctgcctcacgcgctacgcacgctgaaactggctgacgagcaaatcgccgaactctccatgctctgcggcttcgatgatgatcttgccgcacagacaacgcaggccagcaaccgtatccgcggccttctgacccagatacatccggcactggagcgcgttctcggtccgagacttgatcacccggcggtactcgatcttctccagcgatatccctcaccagaaaaactcgcttcgctgggtgagaagaagctggcagcccagctctgcaaacttgcgcctcgtctgggtaaacgccttgcagcagacatagctcaggcactggccgaacaaaccgtcgtcgttcccggcacgaatgccgctgccgtagtactgccacgtctggcactccagctcatcacgctgcgtaagcaaagagacgaggtggcgcttgcggtagaacagcgagttcttgctcaccctctttacccggtcctgaccagtatgcccggagtcggtgtcaggaccgcagccagactcctcaccgaggtcgcctgccgcgccttcgcctctgtcgcacatctcgctgcttatgctggccttgcgccggtaactcggcgatccggctcgtcaatacgcggtgagcatccctcgcgacggggtaataaagctctcaaacgggcgttgttcctgtcggccttcgccgcgctcagggatccgctctccagggcttactacacccgcaaaatgagtcagggaaaacgacacaatcaggcgcttatcgccctggcgagacgacgctgcgacgttctgttcgccatgatgcgcgacgggactttttataccccgcaggcgtcataacatgcttgacaacttaataggggcaccccccgggattccgctacggctctgccatcgcaatccccccgtttatctccggacagccagattcccgattattttttacgtttctccccggttgttatgccggtgaaggtggcgcgctgttttcatgaccacaccggctggtttaacaacatccggaggaacattctcatggctaccccagtttcgctgatggatgaccagatggtcgacatggcgtttatcactcaactgaccggcttaaccgataagtggttttacaaactcatcaaagttgggggctttcctgcccccatcaaaatggggcgcagctcccgctggctgaaaagtgaagtggaagcctggctgcaggcgcgtattgcacagtcccgtccgtaatttttaaccactaacccttcgcccaaagcagacgcaatctccggcctgccggcggcgctctgctgcctgttatcccccgtgaggaatatgaaaatgaaacaacagtatcagacccgttacgagctgctccatgaaaactaccagaaatggctgaccggcttcacccggcacgccgtatcatggggcgtgtgtcatccgaatatctactatttccataatctgacgcccgggtgggtgtcattcaatggcgaaaaaccggagattgccatcgttccccagagtctgcaccggctgatttatggtccggacaaactatgagacgacaataactcagtccgcctggcgccgattattctggccggttttgtaacctgagtgtcatttacatgatccaacaggaaatggcgtgacgctcaatacttctcaggtcagttactatatgactcagcgtaagaaaggtataactcagcatatctcggccatgaaggctggtatctcagtccgttctggtcgtcggatcgaaaaaggagagtgggcaaaaaacagtgttcggcactggcgcacacgcaaagatcctctggaagctgtgtgggacagcatgcttgttcctctgttgaaagagaggccggctctgacaccaacaactctgctggagatgctacaggataaatatcccggccagtaccccaacagccttcgaagaacaatgcaacggcgggtccgcgaatggaagctacagtatggtgcagagcaggaggtcatgttccgccagcgacatcagcccggtctgcgaggtctgtcggactttactgaactgaaaggtgtagttgtcaccatcgccggtaagttgttggcgcataagttgtatcacttccgtctggaatggagccactggagctggatgcgggttgtgctgggtggtgagagcttctctgctctggctgaaggtctgcaggaagccctcggacaactgggcggagtgccggtagaacataaaacggacagcctgagggcagcatggaaacaacagggcgaagatggacgccgcgagctgactgagcgttatgctgctctctgtcagcactacggaatgcagggcgtacacaataatgccggtcggggccacgaaaatggctcggttgaaagtgcccacggacatctgaaaaggcgtatctgtcaggcgctgatactgcggggcagtaacgacttcagcwccatag

SEQ ID NO: 60 - DNA, 12744 bp, Escherichia coli
aacgcgacagcgccgaaacgggagtactgttcgagttaatagcgcatcgctatgaacgtgggagcctggtgataaccagtaaccatccgttcagcatgtggggcagcatcttcgtggatgagactatggcggtggcggcggcagaccggctgatccatcacggatatatgttcgaactgaaaggtgaaagctacaggaaaaagacagcgaaggcagtaacaagcgcgacttgatgtcgcactgaagggtgcggccagtatagttggcgcgagtcggcaaaactagttgacgtctaatacaaacggagctccccgtccctggatgatgatctggtggtgaatttatgcaccagcgaacacctgctgattcatcatccgatgctggaagggatcctgctgtctgaatgtgagcgcctgaagcaacattctctggcaaacaaactgatcagcctcttccgtcagtttggcggcacggagttacgtctcaaactggtctggctctgctggcttgacttaatgaccggaaacagccttgacgactggacgaaaaacctgaaacacaaatcagaaaaagatctggagcaatggatcattgcacgtcagggtcagagtgaaccactgacaaatctgatggatcagtacgtgcttatggcataccgtacatcggttgatgccgctcacagttgatgtctgataaccacagggctggcagcagaaaaccagccctgtggtaaaatacagtaatagcggcgtacatcaggcacgccgctcactcgtccacagatcatatacgtcattatactgcgcgataacggagggcttcagcacccggtcatttctgagcgggtatgaataccattgatgatgcgaagcagccacgggcagaaacgttcttcacaaccaggtgcctccatcttcactgcaggctgaatgtgccggcttgttatccaccagaaatggtatgctccggtacatgcataccccggagactataaacgcactgaatcatagcctcccacctcagcaggaggcagtcagctttcaggcggaaaaacgttgcagttaaagatcgtgagaatcgctgtttcgttgcatagcaacccgaacagttgtagttgaaacattttacctgcatcagcacatggtcaggcgccgtctgtatggcgtggaatactgatgtttcggctgatggcaagcctcattctctgtggaaacaggggcgcgcattagcttctcaaccagagagtgtcacaaagacaaatattgctgaaaatcgcattcatcgttcaggcgtgaatgcccggagacaaaagccgctgtccgcacagcccccctctgatctgaacaaaaagcatacacacaacaggctcacctgaccccgaaaaaccataacttcagcaataccagtgacaccagcacgttacctcagtgccacatcttcagaccgcgatcaatctgaaatgtgactatcggggcaatatcccagttttgtggtacacgataaccagaaaacatcccctgaaccgccagccagaaagaccggccacaaaagggttaagctgaaatcgtttatggattacatcgacatatgcctggcagagaatgtccggaatgacgaggttatctttgcggagattaaggcaatgtgtcaacgacggatgaaaagtgatccacttatatctccaccaacggcccaatattgatccaccgttttactcaggattagcttctgctataaccccggcttttcgtttctgtctgagtcgatagctttctcctttgatttgaacgacatgtgagtggtgtaagatacggtccagcatcgctgaggtcagtgctgcatcaccggcgaacgtttgatcccactgcccgaacggcagattggatgtcaggatcattgcgctcttttcgtaacgtttagcaatgacctggaagaacagttttgcttcttcctgactgaacggcagatagcctatttcatcaatgatgagcaggcggggggccattactccacgctgaagcgtcgttttataacggccctgacgttgttccgtagataactgaagtaacagatctgctgctgttgtgaagcgaactttgatacctgcacggacggcttcatagcccatcgctattgccagatgggttttccccacacctgatggccccagtaatacgatattttcattacgttctatgaagctgagtgagcgtaacgactggagttgcttctgcggtgctccggtggcgaatgtgaagtcatactcttcgaacgttttcaccgccgggaaggctgccattcgggtatacatcgcctgtttacgttgatgacgtgccagtttttcttcatgaagcagatgctccaggaagtccatataactccattcctggtctactgcctgttgtgacagcgcaggcgctgcgcttataaggctttccagttgcaactgcccggcgagcgccatcagtcgttgatgttgcagttccatcatcacgccactcctctgcagaatgagtcgtagatggagagtggatgatgcagggggtgtttgtcgaagttcaccagattttcactaggatgcacgtcatactcttttttctccggaggcagtgccagcatggactgctgctcttcgagccagcgatcgcagggacgggcctggattgtttcatgctttcgttggttagcgacatcgtgcagccagcgcagaccgtggcggttggctgtttcaacatcgacagtgatccccatcgggcgcaggcgagtcattagtgggatgtaaaaactgttacgggtgtactgcaccatccgttccaccttacctttagtctgtgccctgaaggggcgacacagtcggggagagaagcccatctccttgccgaactgccacagcgaaggatggaaccggtgctgaccggtctgatatgcgtcacgttgcagaaccacagttttcatattgtcatacaacacttcgcgcggcacaccaccaaagaagcggaacgcattacgatggcaggtttccagcgtgtcataacgcatattgtcagtgaattcgatgtacaacattcggctgtatccgagaacagcaacgaacacgtgaagcggtgagcggccattacgcatagtgccccagtcaacctgcatctgtcgtccgggttcagtttcgaaccgaacggcaggctcctgctcctgaggaaccgagagagaacgaatgaatcccctgagaatggtcattccgccacgatatccctggtctctgatctcgcgagcgattaccgttgccgggattttgtaaggatgagcatcggcgatgcgttgacgaatataatcccggtattcatccaggagtgaagcaacagcaggtcgcggcgtatattttggcggctcagattttgcctgcaaataacgtttaaccgtattgcgggagatccccagttctctggcaatcgcccggctactcattccctgcttgtgcaggattttaatttccataactgtctcaaaagtgaccataagctctcctgaatcaggagagcagattaccccctggatctgatttcaggcgttgggtgtggatcactattgcaccgttcgtgacacaatgggccatacgggccgacgttccatgccgcgttactacattcagcccggacgtaaaatgcgcccgtcaaaaagaacggttcgcttcgaaactcagccaggataccacctctccgccacacccgggaagaagttgatatggtggttgccggacaacagagctcctggattgactgctgcatcactcaaccacgctgaatatcaaaggagagcgttaccggttaaaagagaaacgtaaagctgtggtgatgacccaaaacgcaacgcctgtcagtgaggatgaaatggtgaaaagcggacagcaccagtaacggaagtatcttagcgggtacgaaaatggcaggatcgtgacattgacagaatatctcctgatcatcctgaatgactgcagttgctgtggaaaagtaagctgtctccacccacggcacgacttaacaggcattccgtaactcccccagacttactatgacgcattatcggtgcacttaaaaccgcagaccgcattgcgggtgttactgcatgacagtctgaccgtattgtgagatgtcggcaggaaccgatgtccgcgcaggggggaacttcctgcagtacctgacgcttcaaatagtattaaccgtagggcgttgttggttccggatcgcggaaatgggagcacaggtctgctacggggtgtacctctgacagtaaatccggctcgctcatctgacagcctctctcccggaaaagaccaaaaatgagatcgtctcctcaacagcagagaagaggtcttgacagacaggctacattgcatacgatttatgaagaaaaagacagcaaatatggaggttatagcggagaacaccctacgaaattcctatgaaaaacgattgaaaaaaatatcaaattcgattcgtttttatatgctttttgggaacgtggcgatgacgaactgttgcatgtgcagaggagaatgcacccggaagcaccagaatcatccagaaaggcagaacgattacgcatcaaaccaggagacagcaatatcaaggtaatacactgatttaaaatgaatttacagcaatacgtgaaaacattttttacttaaaggagacagatgcgctgaagagagtgcaggtatttttatataaaaatgagaagattacgggatatatatccggcacactatgaccggagaataccagtcaggcttaaaaagacaataaatacagtgagttaaatacacagagaaaacgaaaacgtagtatcagagggtacatcttacaacagagactgaatttccggtttttcataaccggccattccggaaagtgcaggcggcccggagctcttctgacgccagtacctgccagattgttctgtacattctgtacatcatgtacggaggtttttgtttgctttcttaaaatctgcaaatgtgggaagagcaggtgaggtgtattgtgggaaaggaactggatgatatctgcaccagctgtccgtatatcgatgctataaaacggcacaaacaacagctcggtgccatagaggaatatacacagtggttaaaaaaagaaccacgggcatcttatttttttctgttccggctgtatacccgcattcacaatacatttttccccaaaaagcaacaactcccgttcactcccggtggcactcactgcccggaacctgatgtcacccttcgggacttaacgctttccccgggctaccacagtgattatgcccctcaacccattccggagatggacagttctgctgttgttcccccaactaatgaaaacacctcgcctccggaagatactcccgacaacactccggccggaggcaataccggacaagcggaaaagaccagaaactcaggactcacacccattcctgaaaaacgttcaggaatgcccccggaacatctgcggtttgccacagggtttccaccgcaaccgaagattgccggtcccaaaggaaagccgatgcgcaccgtgcatccggataaaatctaccgtgaaattatatggttctgctccggttacctgcggaaatccggaccagaggctacgaggacgatcatcaactcaatattctgtgaatgggccagcatcttcaatgattactcctcccccttttcgtgggtggacagcagggacagtgaacagtgtgactggttatggaacgccatgcaggtccggtgtgtgggaaccccgctgaatccccttaccccggagcagaaatactggttcgcctgcgccacgtttgataactgggaaggctggaatgagcaacaggtacagtttttactggaaagtaatcccagacggaacagagcgaagtttacgcaggcctccttccaggcccccaggattcagcataaagcgattcttcttgatgagctgaaaagtgcccgggagcaacaaaaaaggcgtgatgaacgtgctgatggttccgtcccgctgaaactgtccggaaaaatccacaaacagcctgaaagtattgcccgaagtcgtggtgtcctcccaaaaaaactgctgaatgaaatgattgagcaggcgtaccaggactttgtggcaaatgagcaacacaagacactgagttaaggaccgcagggcctccggttaccgattctgcagcatacacaacgaatgtgtccggctcttacctgtgggggccgcactaaagttacgcattgagtatgagtgggtaatcccggatgagaatatcccggtttttacactattcactgaaggtgcgacatatcattcagtctctctgaattcttcatttcagtggccccggctacagtcgtttaatctcctccacgaaccggggccgcaacttgttgtgtcaataccaaattgttggtcattactgtcttgtgtcactggcgctgacaagtgaactgaaatccgcaccttaatattctgactggctgcgtacattcatggcatgaagcggccggagcggctgaactgaaggtccgttgtgagcgaacagcggacattcactacacatggttcaaacatgaaccggagctttattgtctagctgtcagtgtactgcgatttacccgctcggctgtccagaaaatcggtctgaaatccagtcattaaagggccttagcctgacattaagcaacttggtaggcggatagataatagaaataggaatgcgcaggtctgtcatgttgcctagaacggtgacaagctgtccggtgcgaaatcattccggcagcgacaggctcatgtgtcagcccgacgcccagaccgtcaacgagcatgtggatctgcgaggcgttatcgttcgcagcgatgttaaaacgaacaatctgctcatcttctagaagcacaagtgctttaatgacattaaggcggtctatatgttgcattacagacttcctattgatctttacctgaggctgaagcaaccacgttaatccgactatttttcgattgcaccatccactatcaccatcgatcttccctgagcacaacgttcaactctcccgcgtacgccgtatacctgcgcaaggctctctgcatggatcaccgtttgcgggtcgccgctgtcgataagtttcccctctttcagcatgatgacctgggcggcatgccgcagtgcgatattgatatcgtgtaagacgaccagcgtaaccatattgcgtcttcgcgtttcgcgcgatacaacatccatcacatggaactgataattgagatccagcgcgctcagtggttcatccagcaataataatgcggggcggcgaataagcgactgtgcaagccccaccagctgcttctgaccgccggacaggctatcgaggtagttcattgccagatgtgcgatgcctagctcttcgagcagcgctatagcctgcgcctgattttgcccggcgccggaggcgcgctgggcgacaaccaccgactccagcacctgtaaatgcacgccctgcggcagggactgcggcaggaacacaactttttcagcccgacgagcaaacggcagcgataagagattctcttcattcagccaggcttcgccactggcgcgatttagcccggccagggcgcgcagtagcgttgatttaccgcagccattaggccccagcagtacagtgacttcgccgcgcggcagcgtagaaatcgacagatgctcaataatccgccgtttgccgtaaccggcgcacagcgcattaatcgtaagcccgctcatgacatactccctcgatgacgcattacaatgctcagaaagaacggaacgcctaccagcgaggtaacaattcctaccggtaaaatgacaccgggaatgatgttcttcgacgctaccgaggccagcgatagcaccagcccaccgataaggatgcttccgggcaaataaaagcgatgatcttctcccagcaacaggcgggaaatatgcggtgcaaccaggccaataaagccaattggccccacaaacgcaaccgaaagggccgccagcaggctgatgcgcagcagggaacccaggcgcaaacggcgaacatcaatgccaaaactcatcgcccgctcttcgccgaggcgtagcgcggtaagctgccaggcacgacgcagcgaccagggtaaaacaatcgccatcgccgccgccagcaccgccagtttctcccatgatgcgcgagccaggctgcccatcgtccagaacaccaggccctgcaaagtatcttcatcggcgacaaactgcataatggacaccagcgcattgaaggtaaacaccagcgcaatcccaaacagcacaacgcccgacgtcggcacgcgcgtccagcgggtcagactatcgagcagcagggcggacaggagcgcaaaaagaaaagcgtttgccggtataaacccgctttcgggaacgccgggaataccgatgcccagaacaatcgccagcgctgcgccaaaggccgccgccgacgaaacgccaagcgtaaacgggctggcgagggagttattcagaatagtttgcatctctgccccggccaaacccagcgccattcctaccaggagcgccatcagcgcatagggcaaacggatgtcccaaacgataacccgcatgccgttagtcgccccggacggatgcatcaaagtctttatcagcgaatgtaaagggagccctgaggggccgagggtgaaatcgagcagcagcgaagcaatgatagcgataaaaataaccgccagtattaccagacgctggcgaaaaagctggcgatagcggttctcgaccgacagcgtactttccaatacagtcatggtttttcacagcctccgttagcgcggcggattgagcacatcgctcatctgcgcatcgcttaacgtcaggccaaagaactgccgataaaactcacgcgtctctttgcgtatatccacatcagcaaatcgcgcaggataaagcgttttcgccagccacaaaaattgcagcgcctcttcgctggtttcacggcaccaccagaacattcctttcggattaacgtaaacgcgatgatgaatgaccgcgtccacgcttgcccactgcggagaactcagaatggcatccgcgtcgcgcttgttcatcgcgatgataaccgccggattggcagtgacaattttctccagcgcgacttcacccgaacgattttgttgatgctcgccaaaccaattttcagcgatatttttgccgccggccaggtcaatccagtcctggtttagcgagggtctaccggtggtggtcagcggattgcccatactgtgatagagcgacacgcgctgtgacgcaggaagatctttcaggcgcccggtgaccagggccacgttgcgatcgaagtagcgttgataggcgagcgctttttgctgcgcatcgggccccagcaccgctgccgtttgctgtacgcgctgcgttaacgcccgcagtgaattcgcctcaaacgccagcacctgcaccccagcctgtttcagcaacgcctgttgaggcactaccatattctgcggtacaaaaagcatatcgacccccagcgcgataatctgttcgggattgatttcatgcccgctgtttacgctaactgctgcgactttctctatgcgcggcaggctctggcgaaacagggggatcctttttgcaatcatcgaggttccgacaatgttatcgccgtaccccagcatggcaataatggtattttgcgccggccacggtgacgcgatacgcacctccttgtgcgtattttctgcgtgcaggctggccgccagcagcagcgccagcagcggaaataaacgggagagtttcatcatttatccatcagaaatcgaaggtgacggatgcacgcacttcgcggccgccgccgataaacgcacttggggaaccgttatcgccatcggtacccgatgggaagatagaagcccagtaatgtttatcaaacacgttgtttaccaccacgcggaaagtggttgggacgttgctcactttcgtggtgtaacgcgttcccaaatcccatgtggtatagctgctggcgtaagaggtgttggtatcgttcgccgcgcgtttgcccgtataatggacgttagcgctgtaaacccattccggtatggacggcaaactgtattccgccaacagattggcctgcactttcggcacgccgacaacctgtttattgctggttgaggcattcgccgtatctttcagtttcgggtcgaggaaggtcacgccgctgtaaatattcagcccctgccacacattcccggcagcggttaactcaaggccgttgttaacctggttaccctgctctttatacacgttatccgtatcaagataggcaaacggacgttccagtcggaacagcgcggcgcctagattcatctcgccgatgtccgattttagccccacttcatactgcttgctgcgatacgggtttagcgtttgaccggcattttttacgctctcatccgtcggtgcggtaccgccctgctccagcgaatcggcatagctaacgtaggccattgtgttaggggtaattttatacatcagcgcggcgttcggacttaaaccattttcatcaacctggttcgtttgattaccgtgcttatcgtagtttttagtctgcagccagctctggctgagatagaacattgccgaccactgcggcgtaaatgtcaccgtatcgccgagcgtaacgctctgctgagtatttacgctggagcggtatcgcggcccgccggtgcggattttgccatcgccctgctcatctatcgcatccgggtgatacatatttgttgtaccccagctatagctggaacctgttcctttggcactataaagcgaccagacatatcccgtggtagaaagtgacagatcgtggccgatagagccggtatcaatatgaccattcagcccggcggtgttgctcaggacgcgaaaacgtccggcagcggtggaatccttcatcgaacgagagatatcgccctgattgttgagtattttactggaaacactacgcatcgcgcggtcagcctgctgccagcccacgccagcgttcatggaccagtcgtcgttaaagtagtggatcaggcgagtgctgatggtatcggtagtgaggtcgttgcccgcagtgctgagcgccagatttttgtccttcggattcggcgcagacggcagtttgacgttcggcccatagttaaagctaccgacatagcctttctggataaattcgtaatggctggcgtcgagctgtagctgagtgcccggctgaatattccagtcgagcgcaacggaaacgagtttgcgacgcagcgtgctgtcatccacattgccttccccttcctgatcaagcaggttcacgcgatagccaaaccgtttgttttcatcaaaatggccacccagatcggcatggccggtaaacgcactgcggctttgatagcccagcgtcactttacgcagcgtctcttcggttgggcgcttcgccacgaaattaaactgccctgctgggctcgccgggccgtacagcgcgccggtcaaactgttaagcacatccatgcgctcaagcatttccaccggaaacgcggttgttgaaacgatattcagcccgtccagacggctgttggccaccacgctgccctgcatcccccgactttgcggacgcccgacatccattccaccgcgcgcctgcatttgcgtactgggagagtatttcagcatctcgctgacgctttgcgcctgctgattttcaatcatctctttagtaacagtggtgctggaatatggtgtttcgatccaggatttcgttcccagcgggccgacatctatatcgttcgttttgaaaccggcaccggcggcagaatcggtggtgtcggcggcggtgttgcccgtgacaatcatttcatcttcagaagtagacgaggcatgagcatgaagcggtatgaaagacgctaatgctggcaaaagcgcagcgaaagttatttgagttttcatgaatcactgatcgttatgtaaatatttatattacgatcggtgcataggcaaaattatgatccagatcacacgtgaatgtaagttatttacaaattacgctaaccttctgtctccgctctttgcagcataaaagtatggcggcgcgttgttgaaagcaggagcggccgggttgtcagaaagctggtttggacgcaagtaatatataacaactctgattaccgcatactgtcaggacagtatctacttgagcgtccgcctttggcacaaagcggactgtcagattagattcagacctgtactcattagctgatacaaatcagccacatatacctgcattcaaaataatttcagaaagatattatctccgtgaatcccccgccacctttccggtgcacggggttttgtcttttttcactgggaatacatgtatgaatccgtctgatgccattgaggcaattgaaaaaccgctctcctccctgccttacccgatttcccgtcacatcctggaacatctgcgcaaactcacccgtcacgaacccgtgcctggcattatgggtaaaagcggggccggtaaatcctcactctgtaatgcactgtttcagggggaggtcaccccggtcagtgcactcatgacagtgcttcccggacatgccgccatccatctgatgacacgcctgcaggacgaactgcgcacggagtctgtccgcactcaga

SEQ ID NO: 61 - DNA, 7464 bp, Escherichia coli
cggtggtgatgtaccaggctgttgttacagatttttaactccatgaaaacactatgcaaacgcagccatacccggggtgtccccttgcgttgtgttcctcaagttaatagaatacatcgatcgttactattatattgatcgttataaacgatcgtttgtagtaaatgacctcctccgtggttgtcatgaaaatgcgtctcaggaaggttaaataatgcacgaaaagaacatcgccctgctttgtgatgaagccgaccgacttttgcaactgaacattaatctgctccggcaaatggttgaggagccagatgtgttatctgacagtaagaacgaaaacagactgctttttgataaacagaaagcactgaaaagaattgaggagctggagggcgaacaaatcaaaaccgcccgcagggagatggtgctggctgttgtcggcacgatgaaagcaggcaaatcaaccaccatcaacgccattgtggggcaggaaattctgcctaaccgtaaccgccccatgacctctgtaccgacgctcatccgccacgttcccggaaaaactgagccggttctccatctggaacatattcagcctgtccgcaatttattaatcacactgcaggaaaaactcgccaccccggcaggacagcaggtcgcacagaccctgcagcaaaccggggatacccgcgaactgctggatattctgacggatgatggctggctcaaaaatgaataccacggggaggaggaaatctttaccggactggcatcgttaaacgatctggttcgtcttgctgcggcaatggagactgaatttccttttgatgaatacgcagaagtgcagaaactgccggtgatcgacgtggaattcagccatctggtggggatggatgcatgccakggaacactcacactgctggatacccccggccctaatgaggccggacaaccgcagatggaagtgatgatgcgggatcaactgcagaaagcctctgcggttctggctgtgatggattacacccagatgaactcaaaagcggatgaagacgtccgtaaagagcttaatgccattgctgacgtatcagccggccgcctgtttgtactggtcaataaatttgatgagaaagaccgcaatggcgatggggcagatgccgtacgccagaaagttccggcaatgctgaacagcgatgtgctgcccgcctcccgcgtttatcccggatcctcacgccaggcatacctggctaaccgtgcgcttcatgagttacggaaaaacggaacccttcctgttgatgaagcctgggtcgatgattttgtcagggaagccttcggtcgcatgaaaaaagattacgtctgtaaagacagcgaactggcaactgaaggggcgacagacctgtgggaatgctcacttatcgatcaactgataacggaagtcatactgagttcacactccagagctgcggcactggcggttgattctgccgccgcaaaactgatgcagaatgcagaaaatatcagtgaatacctgtcgttacgccatcaggggctgatgcaaagtattcagtcactgcaggcgcatatcaccagcctgcttgaggatatccgggaaatagcagactgtcaggagcaagtgaccgctgatgtcagaatggccatggaggagatcgatgccagaacccgggaattactgacgggggtctgcacctcactggaagaggagctgaatgactatttcagaagcggtaaacgcaaagaacagcaaatgctggaggaagaaaattcagcgcagccccgggagagaaacgcattcgctttctttcacgatattttcggaaccggaaatcagcatgacaggatgcgggactttgatcccgacagccccgaaataaaattcagtgatcgcagggaagcccttgaactgatgacgcaaatcgaatcgaccgtgaccagcctgcaccgtgaggctgaagcacagttccggcctgagctggagaaaatcgtcagcgggattgaaacaggttttcgtggcacggccctgtacgccacagaaaacattgccggtcgcatcaatacccgcctggaggatgagggctttaccgtaaaaatcagttttccggcagtcagtcagttacaaacccggctcgcggtaaaaacaaatctgagtgcgcttatggaggaaagaacggagaccgtcacccgtcgccgtcggcagagtggtttatggggaaagatttgtggagcgtttggcaccagtgactggggctgggaaacctataaagaggatgtgagccgcagtgttatcaatatcaacaccgtcaggaaggaagttatgtcactgacccgggcatatttcggggagctgcaggcatccattgagcaggatattaaccagcccgtccgccaggaaatcgatgcctttttctgcgcattcagggagaaagttgaacaactgcgtaacacgctgattcagagctctgaagatcataaacgcgatcagcaggcacaggaacggcttaccaggcgacttcaggcattaaatgaaagggttcctgagctcattactgacagtaaggcgctgagggaagagctggagacaatgctgtgacttcaccatttattcaacaaattgctgataaccgggtatgtcaggtactcacctgtcttcctgaaaaatttgtggttgatttcgcaaacggaatcgatgttgcacaggagcatatccgcacggccggagagcgcacgttcttccggcgtttaaaagagggactgaccggcgaaggcgctgcacggcagaatgccatcaatgcttcggttgcacagggccttgaggcgtccctgcgctggctgacggagctgacaacgtcacttgccaccacaaactacgcgattacccgggtaaacgacagggtcagttcactggtcagtgatactgccaggctggcgcattattccgcagatacacgggagcagttactcatcctggccgatcaggttcaccataaactgaatcatcttgaagaaaaactccaccgtgttgaccaggttcagcgggcgcagttacatcttgagcagatattctcatggtggagcgccgggcgatatgcgtcattttcccctgccggacgttgttatgtggcgcttgaagagcttcgctggggcgcgtttggtgatgtgatacgtcagggcgaaacaggccaggttaaccagctactggatattctcagacataaagcattaacgcagatggcacaggagagtggcggtagtgcaaccgtgcgtctgaacactctggactggcttggtggtcagggccgggagcaggcagataacgagtggcatgacgcgattaactggctgggagactggtgcagtgaagagcagcatccggtgatctggtcaaccacgcaggctgcagaacacttaccggttcgcatgcctcgcctctgctctgcagaacgcctctctgaaagtatggtcgatgaaatatttcagaagggggctgcatgagtacagaaatgaaaacggggctggtgctgtccggtggcggggcggtgggcgcttatcaggcgggagtggttaaggcactggcagagtgtggtacacagatcagcatggtttcaggggccagcattggcgcattcaatggtgccattatcgcggcctctcccgatctgtcagaagctgccgtacgcctggaggcgctctgggatcatctggggaataatcaggtgctgtcggtaaaccgattggtttacttttcattgctgaaaaaattgttccaggcaatgaacctctgccagatccccggacgtgcaggagcactgcttacgacgcttcttcgccatatatcgatactcaacgggtttgacaatctgatggctcagccgttgttgtcagatgagcccctgacagcgctgttggatcattatcttgatactgatgctctggcagacgggctaccgctgtatgtgtcgctgtaccccacagaagggggcatgcaggatattattgactgcattcgtgctgaactgggtgccggaaccacgaaaaacgccgtttttcagcatatccagagcctgccccgcggacagcagaaagaggctctgcttgcgtcagccgcgctgcccctgctgttccgtccccgtgaggttcaggggacaatgttcggtgatggtggtatgggaggatggcgaaatatgcagggaaatacccctgtgacgcctctggtcgatgccggatgcaatatggtgattgtgacgcatctgagtgacggttctttatgggatcgccaggcttttccggacaccacaatccttgagatccgtccccggaaaaggctgaaatatgcaggtgatggtgacaacagcggcggtctgctcagtttcacgttggcacataccgacgcctggcgtcagcagggctatgaagacacgatgctgacgatggagcatatccggaaaccgctggcagcacgtcaggtactgtcccggtcagaaacggtgttgcagaaaagtctggagataacggaagaggcagatttggcactgagaaacgcgatggcccggattaaataaagacgccccaaagaaacgccaccgcctgtggtggtgtttttcctggctggtgttattgaaaatattttcagatatatattacctgagagaaagttttacccctcacctgtcaattcactcactggaaatttaattatgcaattacctgtaaagttattaatgagccttatatctctggtcagcgttattgcacgtgccgggaaatataaaaattacatccgggatgaaataaaatactggcgatatacatcatacaaggggggggaatttccggaaggtttcactgatgagaaattttccagcgccatttacaacggaagaatatttacaatgaaacgtttacataccctgatgttatttctggcggttctgtttactggctttaacgtggaagcagcgagcgtgaaacaagcgctcagctgcgacccaaacgcccgggctgaacaacctggagcgtgtccaacaacgtacgagttgtacgaaggtgacgctgcctacaaagctgcgcttgacaaagcattaaaaccggtcggactgagcggcatgttcggtaaaggcgggtatatggatggccctggcggaaacgtaacgccagtaaccattaacggtacagtctggctccagggcgacggttgcaaagccaatacctgcggctgggactttatcgtaacactctataacccaaaaacccatgaagtcgttggctaccgctactttggtttagatgacccggcctacctggtttggttcggcgaaattggcgtgcatgaattcgcgtatctggtgaaaaactacgtagctgcggttaactaatttaaggagtctgtcatgaaaacttttatcaaaactttactcgttgctgtaactattctgttctctgtcttcgctacggcgaaacaagtaaaactgccaaacaacatcaaatacgttaatactacagaggcgttttcctgtactgagattgacggtatgaattgccagacgaagaatccgtttaactataaagataacagctatgttttcgtgcttgaacgtggtggtgcctggtgttacgactacactgtctcggtacttaacctgaaaaccgggaaagcacagatgctcgaatacaaagacaaccagctgtgctcaggtagcaacaaaccgttcttcgaaatcaaaaatggcgtaccgacggtaggagtcatcgacacatccggaaaacctgtcgttgtggctctggacaaacttaaaacctgaggagtaaaccatgcgtttctctgcacattattaatatcaaaggtaaatacagccccagccattgttgccggaaagccgcttaatgcgtggctcgccagtgaaaggcttctcagacaataaacctcattcatttcacccgtcaggccgcgtcttctccgggagacgtggcttttttcatttattacaccagtaaatcttaaccaccgataaggagcaaagtatgcgattagcaagtcgttttggttatgctgcaaaccagatacgtcgtgaccgtccactgacacatgaagagctgatgcaccatgtgccggggattttcggggaagagaaacacacgtcccgaagccagaactatacgtacatccccaccatcaccgtactggaaaatctgcagcgggaaggctttcagccgttcttcgcctgccagacccgtgtgcgcgaccagagccgccgggaatataccaaacatatgctgcgtctgcggcgggccggacagataaccggtcagcatgtgcctgaaattattctgctcaactcccatgacggttcatccagctaccagatgttacccggatattttcgtgccatttgtaccaatggcctggtctgcggtcagtcgctgggagaagtccgggtgccacaccggggaaacgtggtggacagggtcatagaaggtgcttacgaagtggtgggcgtgtttgacctgattgaggaaaagcgtgatgccatgcagtcgctggtcctgccgccaccggcacgccaggcgctggcacaggcggcgctgacttaccgttatggtgatgaacatcagcccgtcaccactaccgacattctgacgccacgacgccgggaggattacggtaaggacctgtggagtgcttatcagaccatccaggagaatatgctgaaaggcgggatttccggtcgcagtgccagaggaaaacgtatccatacccgggccattcacagcatcgataccgacattaagctcaaccgggcgttgtgggtgatggcagaaacgctgctggagagcctgcgctgataccgtttccctgaaagcgcagtcctgttcacggctgtcccttcccccagacattccaccattcatttactttttataaggaataatctcatgacaacctcttcgcataattccaccacaccttctgtttccgtggccgctgcatcagggaataaccagtctcagttggttgccactcccgtccctgatgaacagcgcatcagcttctggccgcagcattttggcctcattccacagtgggtcaccctggagccccgtgtcttcggctggatggaccgtctgtatgaagactactgcggtggtatctggaatctgtacaccctgaacaacggtggcgcatttatggcacccgaaccggatgacgatgatgacgaaacatgggtactgttcaatgccatgaacggtaaccgcgctgaaatgagcccggaagccgccggcattgctgcctgtctgatgacgtacagtcatcacgcctgccgtacggagtgttatgccatgacggttcattattaccgtctgcgggattacgccctgcaacatccggaatacgacgccattatgcgcatcattgactgaaagggggcaggaacaatgcaacagatttcctttctgccc

SEQ ID NO: 62 - DNA, 73 bp, Escherichia coli
gaaacaaaaaagccggagcgacaaactccggctttttgagatttaccggatgattatgtcatccggtttgtaa

SEQ ID NO: 63 - DNA, 90 bp, Escherichia coli
agccattgcccgatgcgcaagctttatcgtgcctacacattatctcaacacacgtaggccggataagatgcgccagcatcgcatccggca

SEQ ID NO: 64 - DNA, 10768 bp, Escherichia coli
tgacattgtttactcctgtcaggggtggtcaccgcgaagtgtgcggcttaaatgtggtatagatgttaactcactcatagagatactgaatagcattaccttggatataccacaccggatatctcatcttttccgttttttaaaacccatttatatgaaattactgaattacttgttcagtaactcaaggataagttttgtcttttcttccatcagcggtacatcgccgcgcgattccacattcaaccgcaccaccggttcggtgttggaggagcgcaggttaaagcgccagtcggcaaaggtcatgctgatgccatcggtacgatccaccgccagcgcctcacggctaaaatgctgttccacgcggttaatcgcctcaacgggttgcgccagtttgctgttgatctcaccgcttgccggaaacgctgccatccggtcgcgcaccagttcgcccagcgtttttcctttcaggcacaccagttcggcgaccagcagccacgggatcatgccgctgtcgcagtaagcgaaatcacggaagtaatggtgggcgctcatttcgccaccgtagatagcgtcttccttgcgcatacgttctttaataaaggcgtgtccggttttcgacattaccggggtgccgcctgcggcagtcaccacatcaacggtgttccaggagagacgtggatcgtggatgatcttcgcgccgggatttttttcgaggaacgcttctgccagcaggccgacaatgtagtagccctcaataaactgccctttttcgtcaaacaggaaacagcggtcaaaatcgccatcaaaggcaatgcccatatccgcgccgtgtttgatgaccgcattgcgggtgtcgtcgcgacattccggcagtagcgggttaggaataccgttggggaaattgccgtccggcgtgttgtgcactttgattaattccacgggtgcgccgagggctttaaagcgggcttcaatggcgtccaccaccggacccgccgcgccgttcccggagttaatcaccagcttgagcggcgtgaggtttttgacgttgatataaccgaacaggtgatcaacgtaagcgtcacgcagattgatttgctgatagcgaccgcgtttggtttcatcaacgggaggaaagtcgttggcttctgccagacgctggatgtcgcgcagtccggtatcaccgctgatcgggcgagccccttcgcgcaccagtttcatgccgttgtaatccatcgggttatggctggcggtaacttcgatgccgccatccacgccgagatggaacgtggcgaaatagatttcttcggtgccggacatgccaatatccagcacatcgacgcccgcatcctgtaaccccttcgccagcgccagttttaaggtttcgctggtgagtcggacgtcaccgcctaacacaatggttttcggtttgagaaattcgccataagcgcgaccaatgcgccaggcaatatcttcattcagttcttcgcctaatttcccgcgaatatcataggctttaaagcagggtaaactcgacatgatataccttaaacaaataatacttattacagattaactaaaaatattagcgctcttctactaacgttacattatcaaaaatttagctacgaccatatcggtcctgaaaacggataacatcgtcttcttctaaataagatccagaacgaacttcaattaaatcaagaggaattttccctggattttccaagcagtgtattacaccaagaggtatgtaaacagattcattttcgctaagaatcttagtttcagaacctatagtcacccttgcagttccagaaactatgatccaatgttctgccctatgatggtgcatttgtaaagaaagtccttcaccaggatttactgttatacgtttgacctgataacgctcccctgtgtcaatggaatcatatttaccccaaggacgatatacttcgcgatgaacataatgctcgctacgacctgaatttttaatttgttcgactattttctttacatcctgaactttatttctctctgagacaagaacagcatcctttgtttggacaacaactaaattttccactccaactgtagcaacaattcccgattcggcatatatgaaagaattctttgtttcatgagagaaaatatccccaactattacgttgccgtctgagtctttatcattaatttcccaaagagaagaccatgaaccgacatcactccagccagcatccattggaataacaattgcgtcttttgttttttccattacagcgtaatcaattgactcttcaggacacttagagaaagaactttcatctaaacgcacaaaatcaaggtcaaagttcgctgaagcaattgctttttcacaagcggataaaatatcaggccgaaattgtttaagttcctctatataacgatttgcactaaacaaaaacataccgctattccaataatactcaccggaagcaagatatttagtggctgtctcatgatttggcttttcaacaaatgatgacactataaatgcatccgaatcttcctgattaatatattgtcctcgatgtatataaccataaccagtttctgctttgtctggaattataccaaatgttaccaatttcccatcagcagcgtatggaattgccgatctaacagcgttacaaaatttttcttcatcgtgtataacgtgatctgcagccagtacgagcataagatcatctgcacttttatcagacttagacatcagcaacgccgctaatgcaattgcaggggcagtgttacgcccaacaggctcaaggatgatattctttgaagtcaatctatcgatttttctaagctgttcagcaactataaagcggtattgttcattacaaatgacataagggttggtacaatccaaaccatccagacgattagccgttgtttgaagcatggtatgactaccgattaggctaagaaattgtttcggatagagaattcttgatagtggccacaaccgactgcctgaaccaccagccataatgataggtgtaataattttattattgttcatataatttctcatctaatgtattcattaaattggcaacttttgattcccaagaaaaattattttctacaaaactacgggcattttcagccacttcagtataacgattataatcgtaaattatttctcttagtacgtttttatattgctctactgtatctgcaacaaaaatttcgctacctgattttgcattaataccttcataaccaatgctagatgtaatacatggtaaacctaaagccatgtattcaagaattttattttgtacgcctgctccaagacgaacaggacatatacctatatgccctgtagaagcggaagaattgatatcatcaacagtacctaaagcaattgtatttttaaatgaatttaatatatttttattagtttctgagatcttaccaatcactttaaaaataatattaaactcatcatacaagcaaggtaaaatattcttagcaaaatgttttgcagcatccatattttgtaaagaatacatatttccgataaatataagttccacaggcttatcgatttttatttctctttttatatatctcaaggctgatgtatcaaccccattattgactatatggatattactgcccggattagggtagagatagtcacggtctacggatgaaataaaagtggtcaaatcaaaaagattcgccacagaacgttcatatgattctaatcttttttgttccagagaataaataattgcacgcaaactttttttacttgctaattttttaacgcgactgtaattcaaagatattgcatctgtcatatcaagaattttgaacttgtctgtatccttaacataatcagcaactcttatcagatgacaaaatactgcatcgcattgtttaattaatttattgtatttattcttaaatgtgtccgattgataataagcaatttgcaacggtttttgcgtaaccaaagcttttaatacattataatatgatttatattttggtagatagacacgatgaatttctttgaagaccgagtcatttatatttatttcaagttctagtggttgatcacataagctcagaagaataagatcatattttttggaaagttctttacataacatatagactcttaatctatcccctccaatgacagggtagggaaagcgaggtgtaagaaccagtattttttttctctgctctgattgattcataaaactgaaaccttttatattcagaatccgtctggataattttttttccaacgccacgagtccaataacatctgttctagagtttgttcggcttgccagtccaataaagaattagctttatctgcatcagcccaacaagacgcaacatcccctgcccttctctctataaaagatttattgaccttaatgtttgttaatttttcaaatgtagtgattaattcaagcaccgaataaccttttcctgtaccaagattaaagatattatatcccgaattgatacttaaataattcattgcagccaaatgacctttcgctaagtcaacaacatgaataaaatcccttacacctgttccatcattagtagggtaatcattgccataaataaataatttatcacgtttaccactcgcaacatccaataaataaggaacaagattattagggataccagatggagcctcacctattttaccactagaatgagcaccgacaggattaaaatatctcaagcaaattatatccagttttcccgtggaactaacatcctctagaattttttcaacaaaatacttcgatgtgccatatggattcgtagttcctccaattttagctgtttctggaattggaattatctctggttcaccatagactgtcgcagatgagctaaagataaattttttaattctgtactcttccattacctgtaataaagtaatggtcactccaacattattctggtaatactttaagggttcacttttagactctgaaacagatttaaagccagcaaaatgaataactatatctatggcgtgtttctcgaaaatagcggagagtgtcttcctacacccagcatctccagtaattgttataaaatcacgtcgagtaatttcttttattttttcgatacacttgtatgaagcattactgaaattgtccagaacgataatctcatgacctgcattcagtaattcaatagccgtatgagatccgatatatccagcaccaccagttactaatatgttcatattatatctccactaactaatcgtcaaaatttattatatcaagttcatggccattaaaccgataatgtgaataatatttttgctgataagacattattagctgtttattgatacttttcatcttgaaatctttaggaaattcctcatccaaatgtgagatttttttaacacactccttattgtttataatttcatcatagccgattaaggaatgctctgtcgcataaatatataatccatatgatagtgcttctgcaatttttgttttcattccacttcctaaaactataggagaataaaaaacatcacaagcagataataaatatgacatttcactattagatagattatcgaaaaaaaataaattatccaaatcaggaagattcaaagtagtacttttcctacctgccaaaatatagcaataatcattattagactttgctgcatttaaaacatagttggcagcatctatatttggaaaaaaatcaaaagatgcagtaaatactacttttttcctattatcattattcaatcgattatactcattaataaagtgagctgacaatacatcagttggtttttctctactaaatatcacagggagaattaaatttctgctttttttaatcccataaaatttatccattgcatttttatcttgccgggtaatatagctaactaaatctgaattcttaagcccgataaattcattgagataaacaattaatttttcaataaaagtagttatgtttttatctttttgtcttattaagtcatattcgaagttatccgtaaacaatatgatctttttgtggggcatgagtattctaaaaagcagacataacaatccaagccgagagttgtgaaaagcaagaatatcttgcttccgtaaaattttaattattgagaaaatataagggacataaaatgatggtataaaaaaaagcctggatattatatcctgacgtttacctttaataaatgatatatgttgaaaagtattgtcttcgaatagtttacctgaggattttttatcaataagtgttaaattaacattctgtttttgtagaaaactaacaagcgtacgtaaatatactcctcctccggtaagttcattatatgagttaattgaaatgagacagagtttcttattttttttcattaaatgccgccgttaaaatttccgcatatctctcttcagaaaaaagctcacgcttgctataaatagtttgtctcaaatgataatatttttcattatcaagactaattaatttgtaggctacttgtgctaaatcttctttattattggcaataaatacgccaggaaaactttctgcatacaactctctaattgcaccaacattatagcctatcacagggcaaccacagcatagcgcttcaatagtaaccagctcatatccttcataataggacggtaaaataagtactctggatttcttaaatatttctggcattttcgcataggggacagcaatgctggtcagaacattatttagcgaagcaaaattttgtggggcgggaatacttgaaactaaatggaaggaagtatctggcagatttttacatatgtaatacagatcatctattccttttcctttttccaatcgcccgacaaatgtcacatattctgcttcattaacatcagtgtaatcaaattgtgcaagatttataaaatttcgaacaactttgattttatgtgaattaatattgtaaagctcattccattcacttttaaccttatttgaaacagcccagatattttttgaaaatgctccagcccaacgctcatagaaagataaaagaccactgccagacaaccgattaggttttttattcatgactgtttgaaaataacatttcatattgccatgagctattaagatgtcattcctataaaaaggagaacaatagccatgtgcaataactttaaacgtcacgccacgtaatttttgtaaggttaaataaagagaaactaatattggataaagtgctacttgtatttttttgttacgaattttgttagaaattttgaagtatgttttatcaagtataatgactttaacccccaaatttttaagaatgttacattgttgggcaacaaccctttccaccccaccttgccctcctgaaccattatacgcggcgatatatataatcattttaaaaacttcccgataaacgacttcatttttagcagaacgaattgacactgtcggtaaaatatagcatgcttttgtcctgaaagaagattcaaattatcattatatttttttaaaaatctataattatttatgcaactttcgtaatgatattttaatcgattagctgttcttgcccctcccgtcgcttttcttggaggtaaatttattaacaaagcctttgaatcatatataaattttttatttttaataaatagagatagcatgaaatcagtttcctcacgatagcagtttcccgtataagatatatcaaatcgatatttcgatattagttccctttcagctagaacaaaaggctgtgcataaaaacattcaatcggatggtccaaatcacatgtataactaaaatccaatctatttagatcactaacaaaacgcccctcttttttatgtcgatttatgcaatcttcaattgttttctcgttattattcatataaagtattcttgcgccgattacatcagcgcctgtctcatattttgtagccaataaccgagatataacaccgggtaagaggtaagagtcatcatcaccaaaaaaaatatatttccctttggctatttcaatccctcggtttttagaatacatctgttttttattcgtttcattttctaaaataactaactgagaatatttttccttcagttcagctaatacactatttgtattatctgttgatccatcattgataactataacctctaaagtctcatcctgaaaataacttggtatgacctccttaagaatatgagccctgttataacttgggattattatgctgacatttttttctgacattttggtcaatcctttttatactggatgtataatgtaactaaaaaagcaacaaatatacttttgacaagataggggaagaaatagaacaaagtctctcttggtgtgaataatataggtggcaacacactataataaacaaaatatataattggtttgttttttgtatatttttccaatacatttaaattaagtaaaagtaaaaagggtataatgaaacatccaatcagaccaaatgctaaaaacgattctgctaaataactccccccaagtccgaacccaagattatatagttctgggtttgctgtgtatgaggccaaatggctatagcttatttccggcaagctcaatttaacattaaatattgacgagcaagttattattaactggctgaatagataggtaacattatatccccctgacaatagttgtagttttactgattgataaatggaaagatatgatactcccatgccgtatacaaagtttataacaggattattaccctgcattaattgaaaaaaaccccctccagtgcgccacattgagataaattcactaatcacaaaaatgacgctaaaaacaaaaatcattgtaatcagcagacgtaagtttcttgtctttacttcattaaaatatatacatgtaaccgttaaaagaaacgttatagcttcactacgactacccttcaaggtgctaaatgcagcaatgcatatcgcaataaaaagaaattttttatttgttctgaactgtatatgaaacgcacatataaggaaaaaagaacaataaaataaataagatagaaaatcataacctattggcgttgttatatttgattgataaatatcaacataactattagattctataaagttaaaaaagaatatcccttttacaaccatacctatcgaacccagaaaaaataaagtcaaaagaaactttatttttagcaattgtttttcaggataaggaccatgcggataaaatttttcagtatttttgcatagaattagtcccaatgtataaccataatacattagtgttatagcatagttagccaaaatcacatcgtcatccatatatccttcaataaaccaatcggcaatcctataatcatagtttgcaaacaaagataataaagggcgacaacctaaaaacacaaaagatgatataacgagaaggctggccggagaagttattttattagtgatatatgcgatataaaaaactgttatcgttgctataacaaggatatattgtgatttatttggttcattaccaaacagtaacactaaaattgtcagcattaaacttaaatagaatgtaatagcaggaaccgccttcactttcattatactctcgctccccactttcgatgggcaataaaagctagcatactgaatacaagaaactcaccaattaggtttaataaaaccccccccagaatgtcaaagcgtgatattaacagccaggacaaactaacaacaataattcccgccataacatttatacttcgtagtatttttacattatctgtcggtataagaaactgtataccaaggacattatttaaagatgaaaaaatggtaattattgacgcaaataaaataataacaaatgaaacgtcaactttacctataaaagtcgccacatattgccctaatcccatataacatagacatgcaattatgctaattgttaaatgcacaaaaaaactttttttaattctataataaaacagtttatcttgaggtttaatttctgaaacttgagataacatatactgtgatattggattaattagactttgacatgctgttgtcattttttgaacgattgaaaaaacaccaagactcgtattaccgcaaaggtttccaattaacacaggaattagaccattgtaaccaatcgtacctattacgccaataaaaacatttcctgccttcttaaattccacaatgcattcattaggtttaagatgaacaacatggctaatatgaatatttggccataagtatatacagcatatgagtaatgttgcattttgcaaaaaacttaggataaaaacattatctccgccactacagacataaacaagaagtatgataaacaatgttattctcacctattacttgtgagtatgaaagttttttaaaatcaccaatcccctgcaaaaaccaattgggcgataatatattaccaatagtgcatagaaaaattgacaaaaacccaaaaaatgacaagtggactatatttaatctgcacaataaaaatacacatgttaatgcaattataaaaagcaatgatttaaaagaacaactattgagtaatagcgctgtaaatttgggtctcacatctatgtctcgcagcaaccacaggtcctgtgtaagtaaagccaaaatcaataatcaaagccactatttgataaatagatgtaatatagaccaatt

SEQ ID NO: 65 - DNA, 182 bp, Escherichia coli
  misc_feature (168)..(168): Unsure
ggctgatccggtttttcgataaattcaacaatgcggctgactttaccttcgcgatccagcggttctttggtctgaatgacggagtattcagagaaggtcacccgggcatacggttttgccagcacctgggctgcggcccggtttcgttgaagcgcgcaatcatggcangcaaggktggaacg

SEQ ID NO: 66 - DNA, 193 bp, Escherichia coli
aggacggataaggcgttttacgccgcatccggcattcagtgcctgatgcgacgctgacgcgtcttatcaggcctacaagatccgagcacagaaccgtaggccggataaggcgttcacgccgcatccggcattcagtgcctgatgcgacgctggcgcgtcttatcaggcctacaagatccaagcccagcccccc

SEQ ID NO: 67 - DNA, 88 bp, Escherichia coli
ctgccgcgtcttatcaggcctacaaacccgaaccgtaggtcggataaggcgttcacgccgcatccgacaaacagcgcctgatgcgacg

SEQ ID NO: 68 - DNA, 5203 bp, Escherichia coli
tttatatcaaaataacgcttatttattgataattaagattaacctccgtcattaaaataatgagtaaataagtttcagtatcagaatttatcacgccccacaatcaccaatctgatccaccaccgtcagataccagtcactgtcataactgtaaagttgacttaaataaaataccagtccatcgttactctcttctggcgcagcgaccacacgcacggccccgtattccattcgacgcgctgcggcaatctgcgcatcagaaatagtattttgcggtgaaccaaacatctgcgtgaagaccaaactacggctgactttatggtgaacatcgctattgctaataaaatacccctgcttattccagccacgttcgcagttaaatttcgggatagctttcttattaaattcgtcatctcgcggaacatgttcccctgccgagggccatgggaaatactcgggaacaggttgcctgaaattaatttgcttaagattttcaacatccatcgaagcaccacggtggaaaagaacatacaaacccgtttttttatcaattaacgagttgattaattgggcatcttcttgctgaaagcccataatcacctttctggctgtttcctccagcgtacacccggcattggcgggtaaagaaaagaatatcagccccaccagcatcattcctttttttaacatcagcattgtttgcatcttctcatcatggggctcatattacaaatttaacaattttcaggataaaccttacaccatactgttaacctggccgggtaattcgctagctggaatacgaaaggtataccaggcataacgacagcgtttccacaggctggagaaatggagatgataaaggcaatctgcaataatttcgttatctggatataaagactcggcaaaatgtgtccagcgcgcactgagtttcatgttaaacagtttttcatcttctttgttaccatacaggcgcgacaaagtaatcattgcttcgagcgtacctttattcgcttcttcttgtacctgttggaggtgcaaatgagcaagtgagagttctttcacctcaaagatattaagtaaaaaaagcccccatgctttttcatgtccagcttcatgagccagaaataaattgtcaaggagatttttttcataaatagcccgtgtttctttagaaatttcttgtttatttagtgcctggtagcagatagcaatgctaaaataaatattttgtagatcttgttgatgttcgctataaccataattttttaccagtggataagataccgagctatggaaatttaggtcatcttgaagtattttaagtgcccgtcgaaaatactccaaagctgtagatggttcataaggtaattttgtattgtcttccttatccaaatattcaagagcaactaaatttaatgcggcaggaatatttctttgcttaccaattgtcgcaagcggaatgaaataatcagaaaggtcaaaccaactcaaatcttttattgccgaccgccaattatgattgtatttaatgtcactagctttttccagccaagcatcgccctgcccttcatctttttcaaaacccaaaataccctctcgctggaaaaaccccctataaataacaggtgtagcataagttgtattctgtgaattttggcagataaaattatatatccagaatgaatctggataataacttaatgcaaattttatcgcgtacgcagtgtaataattattgagcttcatgtcttccatcaccgctcgctgtatacagcaccacaacttatcgtgatcgttctgcttgttatagcaggcaagtaaccactctagggcattatggcgacattcctgaaattgtgcgtactgagcaatattctctgctaagtcgattgcatattgttgctcctcgggcgcaatgtcctcaatgctgacatctcggtaatcatcccaccaaagtaagagatccatatagtcatgttcttcggtagataagtgcttacaggttactgaatccagcaattcggaaatttctttatgcgaccctccccagcgtggcattcgaaatggtatatattcaacaaaaggataaaaagtgtgaggaaaaatagtcaggcaaacagaaagccaatatttttgcccaccatcatcatcatactcaggaagtatattggggcgaggcaaaacggggcatattgcatgctcaaacgaaagtccggaatacgccatcaacgcttccacttcttgcggggagcggcggtgataatttttcagtgcgatcattaatggtattcctgcgacactatcaccgttaaggtgtgccgccagccaggctggctgaccaaatacttttgagttggtgctggtaagtaatgcagccatccattgtcgtgggtcacaatcaattgctttaagtgtagcgatgaccatttgttcattacatgcaccagcacaaagccacattgcatgtgtggtatcatttgcccagccataactgcgatataaccatgcacggtgattccagtattgtgcttcggcaagccaggcatgtgtagaatgaggtcttgcttgctgccaggttttaatgagtcttaaaccttctgttccggcatcaactagcgtgttcatatcataaaaatagttgcacatttgggtccaggataaaaaatagcgcttttcagcctgacgagaagtgaaactctcctgtaatacctggttataaatttcatctagttcctgataacgtttttcttgtaacatataaggaatatttgcgatttgccattttctctcaagagtattaagtggcattttttggtcacacatcttttgcattgcactgagtaaacgagcatcctgttccatagatatccttttaattaggttcaaaaattttaaattcattccacggcaattttttccagttactggatggatctttcaaccatgcagtgacttcctttaaatcacggttcgcagtggcgacgggggtatcgtatatcattaaccatttttgtcgggcgcgaacataagcactggcataatcttcccatgaagcgaaacaatcttgtgctctttgagcattcagtaataacactatccaggcctggttttcatcgsaccagcctaaaccggcgatgcaacgagttaaaaaagcagtgcgcatacagtcaaacgccagcccatccagaacctggccttgtgctgccagttgttcgtaaaaatcatgtggagaattaccaagccctgtagcccagcgctgtaatataacgccaatttgttgacggaaatcttcgttgctttggtaagtttctgttcctagctcttgtttaacctgtagtgcaagttgttgacgcttatcatcagtcaactttaaatctaacgtgaagccatttactgacagtccattacgacgagcaactatatcaccaattgctaatgcccacttacgtctctttgttgctcgtcttttgtccttgattagatccttttctttttctttagcaataaaagcatcgatttgtggtttgttttttttgtatctatagataaaaataaatattgcgaccaggagaacaatgataagactcattatttttcaacctctgacaggggtaagtaatgagatgtctgtaatgtcaaactctctatctcaaaggaaatgttgctgatattttgacctgcaaattgcggatgccactcagcgccagggaataacatttccgcagaagtagcaactatagggtcaatagcattaagataatgtaacttatcaggtgcgctgtgtaacagtaaccactgcaactccactgaaggatttgtaaaatgttctaataaatgaaagttattatgtagtacgcttagtaaaaaactggtttcgtatacttccgttacatatttccacccctgatattcaggtgtattttcataaacaatacccataccttcacaatcactatgtcgaactgcttgtggtgataatagttgcaaaagagacaaaacatcgtccgcatattttttaactggatgacgattttgcttaccttttatttgatcaatttcaagtgaatcaccaacaacattgagagcaatagtaacatgaggaatattattattatcacgcaaactgaataacccgtaatttatgttgctcaatttgatttgcataatactcaccataaccaccggtaagattttttcgatcatcaaactggcctacgcaatgttgcatatgccatgattcataagccatttcacgacgaaagttcgaatgactggcatcaaactcaacaatttttccgtctggcacatcaagtattgactttacagtattttgttcactcggctgccaccctttctcgcgtcgttgaagcatcttttcatgctcttcttcacgcattctgaacgcaacgtagcaggttatgcgctgtagttttgattccagacgggtaccacatttcctggaaagaaattccaccaactcccgttctttggttaatatttgttgatgatcggtttcgatataataaagtgtcgcagttgatactgaggcagtattaaacttcgataccagccattccgggattacatcatcatttttattaaacagtgaatattctgcaagcgagttaatttgttgcaccattggaaagtcactaattagccatcgataaaaatggttgagtaaccatttttggatggtctcattatcctggcgaaacagacttctttgcaaaattgctgtttttacttccggggcattaattacatcccttgcattataattctggtgaatatttccagtcataacatccgcccgtgtttattatatcactcaaagcaataattgttgactatagattttttatctaaatcagcatggttgcaggtacatactcaagtaagccactcaagaaaataacgaaaactcaatagtggcagcgtcacaaactttggaaattatgtcttatatttgcagtttattttagtgaataattgagataaatgacattattttacatcctcaataattcaggctgtaagaggacggcaaatacattcataattatcaggggatgaacattcaggaaagtggtcagtatcgtcaactttttcttttatcactacatgaagatttcgtgtagatactcccatctctgccacttctcccctcacatttacactggagctaaacccgccgatt

SEQ ID NO: 69 - DNA, 170 bp, Escherichia coli
tgaacctaaagcattggaatatttttgacatcattttctgatggctgcataaaataaaaattctgctttagtttcatctatctgtttgtcattattactcacattcaataatggtgttgaagaatatcccatcacagataaaataaatatgtgcatggtagtcttgaatc

SEQ ID NO: 70 - DNA, 773 bp, Escherichia coli
agaatgacaggcaaataaatatcctccggcatagccggaggtttttcaaatgcgcctataaggctctcttaccagccgcgccctaacaggcgcacacgatctgacatttgcatccaacttcgttacttacggcccgtaaacgggctgcccggatagggaatcgataactgctctcccattttatcctcttcaagctggtgctttatgtaatcctgtatcttcgccgtgttcttacccactgtatcgacgtagtaccctctgcaccagaactccctgttcctgtatttgaatttcaaatcaccaaactgctcgtaaagcatcagactgcttttccctttcagatatcccataaacccggatacgctcattttgggcgggatctccacaagcatatggatatgatctgcacagcattcagcttccagaatccgtacgcttttccactcacacagctttctcaaaatactgcctattgctctacgcttctctctgtagaacacctgtcttcggtattttggcgcaaaaactatgtgatatttacagttccatcgggtgtgcgctaagctcttttcgttccccattgggacccccttttgatttcttgtttgacacttgcagttgccagaccgcaaagtgttttaacaaatcaaaaggggttttaataactggctcaaagctgaaagctttccggaacccccagcctagctgggggttttctgtgcacaaaaaaacggcctcccgggggaagccgtaacaaagtacgcgtggtttta

SEQ ID NO: 71 - DNA, 713 bp, Escherichia coli
aaaataaatatcctccggcatagccggaggtttttcaaatgcgcctataaggctctcttaccagccgcgccctaacaggcgcacacgatctgacatttgcatccaacttcgttacttacggcccgtaaacgggctgcccggatagggaatcgataactgctctcccattttatcctcttcaagctggtgctttatgtaatcctgtatcttcgccgtgttcttacccaccgtatcgacgtaataccctctgcaccagaactccctgttcctgtatttgaatttcaaatcaccaaactgctcgtaaggcatcagactgcttttccctttcagatatcccataaagcctgatacgctcattttgggcgggatctccacaagcatatggatatgatctgcacagcattcagcttccagaatccgtacacttttccactcacacagctttctcaaaatacagcctattgctctacgcttctctctgtagaacacctgtcttcggtattttggcgcaaatactatgtgatatttacagttccatcgggtgtgcgctaagctcttttcgttccccattgggacccccttttgatttcttgtttgacacttgcagttgccagaccgcaaggtgttttaacaaatcaaaaggggttttaataactggctcaaagctgaaagctttccggaacccccagcctagctgggggttttctgtgcac

SEQ ID NO: 72 - DNA, 348 bp, Escherichia coli
gctcaacctcgaatccatatgcacaataaccgacacagaagctaaagagtttcaaactcattgggactgggaaccgcataagccaggtgaaggtgctaaaaatttcctttactcgctggggtatcgccgctgggattttgacacatataaatatatcggcgcttctgactcggcaattgacgcatgggaacgtgaggacttcgctacactcatccaaatgtttaaagcccaccatgcaccgtatcagggggagtggcatctcaactcacttccctttttacctatgcaaaaagcgattaagctatgggaatttctcagcaaagagccgcataccgcgataaaaccagt

SEQ ID NO: 73 - DNA, 332 bp, Escherichia coli
atcatacttcaagtcgcagcatatgcaacttgaagtatggcgagtaaagctttattaaagggggaaacggtattcccccttagatgcgtttcaatttgcccgttacttcaacaaatcaatcaaccgtaacagagccactaatagctccagtacagcaatgagcacggttaacttttgtgtcagcgtgtccatccgctctccttattaaggagcgcaacaccagcaccttacccttacactgcctgtcgatactggtttacgtatgttggaccacgatgttgcactccggatcagggcaccacctacagcaccacccgtccggtagccaggac

SEQ ID NO: 74 - DNA, 377 bp, Escherichia coli
ataagttgtcaggtcagtaactcgatattttgtgtacttgatttgcaaacagctccggtgttggtggcgtcaaaatcgctgaagcgttccccgaaggccggggcagcccacatggatgtgggctgagggcgcgtcttacaaggacgttacctcgcgcccgacccggtagccgaaggggataagctgaaggtaccgcgcagcggcgattttgttcgccagagcccggggtgcagggggaggaggcgattgtcctccccctgcgcgctccttgcgccagtggcaatatgtggcttagctcatgaaaggagcgcaacaagatgatgaagctgaataagcgattcattgtctcagataagctgcgattccactattatcgc

SEQ ID NO: 75 - DNA, 52 bp, Escherichia coli
tgcgcactacgctaaaccaataaagaatcctgcaatagtagcactcatcagg

SEQ ID NO: 76 - DNA, 89 bp, Escherichia coli
cgaagcgcatccggcactggatgcccagatgcggcatgaacgccctacccagcctacgatgcggtttgtaggccggataagcgaagcgc

SEQ ID NO: 77 - DNA, 71 bp, Escherichia coli
gggaacaagtcatctcgctcaaaataattgcaattaaggataacccacagactttaatgaagagtggtatc

SEQ ID NO: 78 - DNA, 144 bp, Escherichia coli
gaaagcggtggttagttagcagattaatttaacgataccaacgcatttatttgacattttttcatctgtttgccggatacgtttgatgtcgatatcaggcaaacagaattatcatttttagttttgtgaattgtccagatcttt

SEQ ID NO: 79 - DNA, 92 bp, Escherichia coli
cgcatgaacgccttatccgacctacagttctgctccagcacaggcctgataagacgcgctggcgtcacatcaggcaacggctgtcggatgca

SEQ ID NO: 80 - DNA, 182 bp, Escherichia coli
gcgctagcgtcgcatcaggcaacggctgtcggatgcagcgtgaacgccttatccgacctactgttctacccctgcgtaggcctgataagacgcgctggcgtcgcatcaggcaacggctgtcggatgcggcgtgaacgccttatccgacctacggctctacccctgcacaggcctgataagat

SEQ ID NO: 81 - DNA, 1701 bp, Escherichia coli
atattaaaaggtggatgagtcgggccatttagccttggatactggcgtctcaaccctggcgataatgaacgtaataatcgggcattaattgaaaaacgtaagcagctttccgacagccttctgtgggctaatggcattgacccttcagaggggcttgaggatgacgacctgctgcaagcgcttatcgacgaattactcaccctcgtcgacggttatctggcacctttcgctcccgtgatggcgaatattctaaaaaactggatgaccgcatgacataacggacaacggggcctgatggccccgttgtgtggtgtatacgctacagctcgttgagcgtgtactggaagcggcaggtggaatcaatcggctggcggctgctggtatcgacacgcaccaccatgtcgtgcagttgcttgtcagtgatgggatgcctgtttggcgccaccgtaacattagcattatcacagcctgatgatgaaaacgtgatcatttgcgcaacccagcgacagtaagcgccctcttcattcatttgcgagccatcacatagtttgccgtctttcatcagataggttgaaagcgttttttcaatcacaccccccgtcgattgcaaagacagtgttttcgttttattgatatagttttcatcccacgaaacatcatacggcgtaactgacacggttgggcacacggacacggttgcatttggtccataatagatatctttatcaacagaaccgaccacaacctggctggtggctctgatactcactaaccacgggcagcctcccacatcaccatcgacggtaatatccagaggcagcttgagacattcccagcggctgtctttggcttccagtgcctccatgcccggacaaaatgaattatttacaattgtcccatcttttaccgtaatcgtcggcgcaggagaactgcccgttcctgtccatgtgcgattgggtaagttgccaagcgtcataacataattactttgataataggtaccgtagtaaacactcgaaacctcagcaacatcaagatacagttcgacctgactattccagccaaacgtagcatagtagatatacacattacgaaatgtctgccccatcccggcccgactaccgagcataaaaaccatcaggatcaaaagacgaaacagcaagttagtttttttcatcttatatgtactcaaacgttgcggttaaggaggcggtaaactcacccatcgtcacttcccgcccgcttttcgcctggagccaggcattaaaattcagattgttattgccgttactcagcacaaaggtcgcgccgctggtattgttaatcggcaccggtgttccatcggttttttccatgccaattccgacaccttgcgccgccgaagatacatccagcgccagaaagcccggctgttcactgtcttctgtaccggtcagcgtcacccggacttcatactgagctggccctttgcaatctttgagctgaaacaccactggcacccgcgcagactgcccggtcaccatcaggtctttacggctaacggtgggaaaatgcacctccgccagcgactcgccctgaacgactaacgtgcaggacttgctgagtaaattgccgtagaaatgcaggttgtcagccgcctgaacatggggcgtcagcagcaccgtcgccagtacagccgcgcagtgagatatccgttttagg

SEQ ID NO: 82 - DNA, 723 bp, Escherichia coli
agtagttgagatagatcgaaacacccgcagcggcaaagttctggttataggtgatcgtatacatctctttgtcgttaccggtccgcgccatgtccgactggttcgcgtccagatactcgctcatggtcatgaagttcttttcggagaaacggtagcctgcaaaggtgacgcggctgttgagttcgtcaaagtctttggcatagctcacgcgaaaggagttgccgtccagttttcctttgccgtatgcgctgtcatgatccaggttgacgtgcgagtgagtcacatcgaacgccagcgcgccaaactgtgcgaggtcgcgccccacccccatcgccgccgactgatagtgtttatctgccagcgcaccaccgtagagcgaccagccatctgccaccccccatgacgcttctccgccggagaaaaagccgccttcggtcttgtggttccagtcttccggacgccccatcatcactttgtaacgcacctgcccctggcgcgtgaggaatggcatagatgcggtcgtaacgtcatattcctgcacctgaccattctgttcttcaacgcggacgtgcagtgtgccggagacggagtcgccgatatcctgaatgcggaatggcccggcgggaacctgggtttcgtaaagtacccggcccatctggctaatggtgacttttgcactgctgtgcgccacgccggaaacatccggtgcatagccgcgcaggt

SEQ ID NO: 83 - DNA, 532 bp, Escherichia coli
cctgacataaaattaatatatattatgcccgatatttatagttagccattgaacatatacactccaatataatcatagaatgtaaacaagtattctctggtgtgtctgtatgttggtcttatctataaaaaaactcaatttagtaatacttaaacactttatgtagattttattaattaatacatctacaaaatactttcaccactttccaacaaaaaaacatgcgaattatcaacaaaaaaacaaaccattataatcaacaaaaatgaattgcttataaagcacactaaaaaaattataatgaccttaccattatttattgctaaaatttaatattaattaaatcaataaatatatattcaagacacaaaaccattatcttctttattttattacgggattcaataatgggaaaatataataactatcgagagttgttaaatattaacaacatttagacaagaaaaagaatgattgtatgacggagaaactgcccggtgtacgcgcacgtaaccgggcattgattgcttaa

SEQ ID NO: 84 - DNA, 70 bp, Escherichia coli
ttgtctcaacagttgattgcccagggtgtacccgcttcattaaccaatggtattaatactccggactctc

SEQ ID NO: 85 - DNA, 12290 bp, Escherichia coli
  gene (1009)..(1884): The complementary sequence is the coding sequence.
  gene (1797)..(5606): The complementary sequence is the coding sequence.
tccccctcgcaataacccacttacaatcagtgagttatcttaaaatccttagtatagtcaaccagtacttcgatatgtgaacgcaaatcatcatgcattcgtgaacttaactggaaacctcccccattcgatgtcaaaatgactaccccaataagttgccaataatcaggctaatcaatacgggtcagtcttgctggtcagtgaccataaaaatgtcacctcatattagacacagcaaataattgtgtcgattaaacatactaccttcagcataaccgttcctgaaaaattattatattcagtaatctgaataaattactggcctgctatttttcttagcaaccatatttagcagcaagccagcaaatctgaatgattacagatgctggcctgctgaatctcccttctggaaatcgtcagaatctagtgattacttactttgttctggtttctcttcattcttattgtgcacttccactttgggtaactgattaaaaaccagattttctttttcaaccagagccatgacttctttggtgatatcagctgactcgttatgcgcaagcacaacacctgaagacaatacagcaatatttttaggattgtcttttctccatgtacctatggcattatctatcgcacgggataacaccatttttgcgctattttcctcaataacacattgtcgctccagtttttgtctggcatcaagaagcagcgcctctttattcgcgttatctgcgaatgctttttgcgcatcctcatagcctttttcaagaatactcttaacctcattcagatgctttctgaccatgtctccggcggcagactgattataaatagcatcgatattaacaactgcaatttcttttgactttttcatataaaaaacaccagtaagtacaatcagcaacagcagcactactgcattaacaacagaaaatttcattacagaactcattatgacaaccctgaggtggcaggaggtcccctcctgccactgtgtgattagaatatatatttaatacccagcattgcctgggcatcactgtaccctttatcgccagcctgaacaccaacattgccccagacattcaggttatctgacaatttaccctgaacacccgttttgacttcagcaatatttgtagctccgtcctgactgagtgccgtattatccattttgacaccccagctccgtgtattatggatccagttaacttccacaaatggctcaaactgatgcgccttattatcatcagacgcactcttacctttcaggtaagttctgacgcccagacgactctggatattaccgtctccgctgagctgaactttcgtgccattcttctccgtatgctcactggctcttacattcatccacgtgatctgggactgcggctgaatataccagtcatagtgactaccctggctaccggtaaattcgccggctttaaaggtataacccgcttccactgaaccggtaaatccacgggatttccaggactccgcagccagtttttcaccattaacggtattattaaaccatccgtactggatccaggtatcgacataagccccgttgtcattaccgtcattctgctgccacgttccgtataaaccggtgctgtatccattgatcgcacctttagatttatatcccgaaagcgaggatgtcgtggaactcttctcatttccataaccggccataatcccctgttgcagacggtcctgaccgtcagtccattgcgcaatgctgccacccagttgcacaacataacggttactttgcgtattcagctgtgaactgctgtccttccakcgattatgacckccgatatgacgcatccacatacttgttgctttcttctcrccagtaaacacatcggtatagtaagtttccccctcacgatcagtgcattctgatgttgaacagcgtgttggctgccagctatgttcgcaatataagagcccgcttccggacgatagaccttctgtacaggtttatccggcgtggggtgtggctgtggctgcggttgtggctgcggctgcggttgtggctgcggctgcggttgtggctgcggctgcggttgtggttctggcggcaattcagaacgcagataccagttaccgtcagtaccacccgcattacctttatgcaggaaatattcccacgcccctgccaccgcacggttctgcagtctgaagttaccgtcagactgcccaccgacatgcacaatctcaatgccgtcagcggtctgagccccctggccccggacattattcaccaccacgccggtatcaccggaggtgttacccgtgacaatcagtttgtcagtggtagaagtatcatcccccagcacggtattgataattaacgtaccgccaccggtgtaatcgccatttacggtcagggtatttcctgtcttaccaccggccagacgaatgacgccggtattggtcagtgagccaacggtaaaattgcccacctctgccgtttcataacctgagagagcattcagtgatgccagtgttccctggttattaacctgacccgaaacggtccccagcccactcagtgtgccgccattaagaacatgaatgtttttggatcctgacaacgtcgcgccagcggcacgggtgactgaatcatcaccgacaatcagaacgccactctcaaccgtggtatcaccggtataagtcagctcatgattaatgatcagattacccgccccctgtttcaccagagcgccggagccagtaatatcattcttcagtaaccagtttccactggcggtaagccaggtgacaccatcactgtcaatcagcccggtgcccaggtgtttttcatctgaagcccgcagagcagcatctttctgcacacggaattcaccgctgaaattactgttatccccggaaagcgtcagatcagtggtgttcagtatacccactgaaccttctccggaaagcgatttactcaggttactgctgactccgctaccgtcggcgatatcaatcgccaggcgatcattaaggctttcaaagctgatggagccctggcttcccagcccctgtgcgccgttcatttcaaccagcgccccctgggtaaggctggcattaccggtaaacccgatattggtgccatgtaccgtcagattgctgcccgtgacagccagcgttccctcaccggacagcacgttgttttcaatgatgccaccattatcatcccccggctgacgctgcgtgccgctgaccgttagtacactaccgctatcaagctgaatgtgcgctcccgtttctgtctgcagtgcaccgacagtctggctgtatccgtttgttctgaagacggcattgctggcgacgttcagattacctgttgcgccaagtacattatcatttgccatctgtaatgtgccgctgcgcaccagcgtatccccggtgtagttattaccgccgttagacagtgtgacaacctgccccgcagcttcgatggccagatcccctgcccccgttaactgtgcgccaagatctgtctgcagtccctgggcattcgctctcggtgtcagcaccagcgctttatcaccggttccctgtaaatccagcgacttcagcccatagcctatgtacagtccgtcacctttaataccgtcggagcttcccagcagcttatagtcataatttccctgagctacaacttcaccgccctgagtgacatcaaacgtctgactgtgagaaatagcctgcccgttttcatccaccagttgcagttgcccgccagtaccggtgacggtacccgctgcattcaccagcgtgaccagggtctgcgcatcatcctgctccagcaaattcttacgggtatcaacagccggaatatcattaatcacttcatctggcatggtgacctgaattgtgcctttcccccggatatccagcgtacctgcagcagaggtttcaatactgttgctggcaatggtatcgcccggcataacggaaccaaaaatcagcgttccgccattgaacccaagaccgccaatctgctgaacaccggagccaaccgttgtgatattcccggtttcagacatcagcattgcatgggttaacccgctcgtattcagcccttccagagcaaagctactagtacccagcttcagagttccggcaaattgatccccgacgttatggctgaattcaaaagcagatgtgtcggcatcaagacgggcagacagtgttcctttgcctgttaacagtggatcaaaggtaaagttgcctgcaactgcgggaataatggccagttcgctgcccgattcaatatcgacggaacccggaccgttccccccatcggtcagcacaagagcttccttcagagtgacaagtgaactgttcttcagcccgacatgttcgaaattctgtagttttacaacagaatccagcgtatgaatggcgttatcaaaaatcagggaatcagaatctccctgcccgccatccagcaggttccaggttgccccttcacctttaatggtgaaggtgttcttcccggtaccggcagtaacctgatcaacatgagtcttaccattgagtgttacattattattgccatttcctgcagtcacttctcctgtcagtgtgctgccatcatcaaataaaaatgtattgttaccctctttcgcactgacggttccggtaatactgcctttattggtgaatgtgttatcaccgccgttcagagccacaaccccctgaatttcagcaccgctgtcattcagtacggtggtattcacggcgtcatcaaacgccattgcagtcccggtggtggacgcagctttaatctgacctttattggtaaaggattgtgcttttgaagcatccactacggcatgactcagagaagcagagatgagattaccgctctgaaccacttcactggctgcattgttaaccaccagagcggaaccgccatcggcctgtataacattgacacttgcaccactcttcacgacagcaccatctttagtgttggcgaaaatacccgtgccgtccgtacccttcaggttaatgaccaatccagcggagtcagacatatccaggttattatcggtttcacttccgtcagctttctggaacgccagtgcaattccactgccgtctacattaatagtgccgctgttggtcttggccagggaggcagaagtacgtacaccaatgccatcagccacattaatttcagtcgtattggttaactgaatgccttcaatttctgcgcggttctcaatcccgtgaccgaccgcacctgcagcattaacattgattttcgcaccatcaataaccagccccacagcccctgtatccagcaggatgccatgcgcatttttctgaccttcgatcgtacccaagccactccctgccaggttcagtgacgcgcccgcccccagcttaatggcagcctcaccatccacagcgacgatatcccctcctgtgctggtaatctgagactgtgcaccttcaacaaataatgcaacagccattgaccgcaatacggcttcctgtattttcaaagcggccgttatcaacccagacgccgatattatctgtaccggtagtgaaatcaatgttgccgttgttaatcaacagtccctgattacgcgtaataaagcccttggcattattcagcggcgaagagatatctgcctcattggtaataaccgagccagtattcgtttgtgtaatactgccatccagagcgtattcatttccgtcaacttccgcgacaacagcgccatcccctacaaggttaactgatgccccctgtttcagcgtcgctgtcgcaccaccagttacatataatccctgagcctgagcgcccaggatctggaaatcactgccagcatcagccaggacattgctccctttccctgtggcccagataccacggctgcctgtcccggaggttttcatcagcagagagccggcctgttttgccccatcttcaatacggaaaagtacagaacgttccccactggcatccagcagagttcccggtgcaatattcgtcttaatggttgcaccatctccgataatacgaaaagcaatctgatcggtaataccagagccgtcagcagcaaagttcggtactgccgaaccatcaaggttaacagtccctttattgctggcctcaacgccaatcgccccctgtccctgcaaagatatagtacccgcggtcatattaaccgttgttgttgtaccagatgcttttatacccgttgtacggttagcattatctcctcccttgagaacgagatttcccgagttattaatcgttgtaacatcttgtgtggcattagcaattagtcccacaccaccatcctgaactgtaatatttccgctgttggtaccaacagccccctcctcaacccggacgcccactgtattctttccagtaaagatgatattaccggtattatttagagtggccccattacgggcgatatacccggtcactttatcctgggtggaacttaactgagcccccgccgttaatagtgtggtcttgtccttcggattaatgagtttgccggaaatatcatagccattgccatccgcaataccggctatcgcactggcattatccatattgataatggcattactttcaattgtgccctgcgctcccccttcaattaaagtcgctgtagccccctcacccgtcaggttgatggtcattcctccagacgttactgtcgaggccacaccgccatccgatttccccgtggcaataagtgcataagagttcttaccagacgccgtaagtgcagaagaagcatctgcagttccctggaatgtcgcaccactggcaatacggaataatgttgagttttcagtggacacatccataacaccgcttccggtattatgaatggcagagtcctttccatagacataaaagcctatctgatcgctgctgccaaatagcactgcaccattgcctgacagggtcagactgccgccatctttagcaaaaacccccacagcccccgtaccggcaagactgatttttccggatacattaacattgcttccggcaccttccacccaggcaccatagttacggaaaccactactgatacccttgccgccaacatttatcgtaccgtcagaattcaactgtcctgcattgattacctgtagcccggtgctgttcagaccattaacattgataatcccggagtttttcatcccggagctattatttgccagcatgccaacattcagtgcaggtgcatcactgtcatgaccgtcaatagtgatagtccctttatttaccacatcaacagtcccggcatcctttgccaggattccgtagttcccctgagcccccctgcccaaaaaaatagtaccttcattaacgactttgtttgcaccattttgtacttcaatcgcaacagaacccacagccgaatgagtcgcagttttatcctccgcaatacctacattgatgctcccgaaggccgagttaataaaagagcctccagctccaacatttacacctcgtgttttgccattattatcattagttgatgcatcggcagtaatatttattgtgcctttatttgttgccatgcccccattactaacaacaattgcggtgttaatcccctctggagcgaaagcatttttaaatgggcgaatattaataacaccattattaatggctgaagaaccattactaccggcaaccatcccctctgcctggagagcatatttatcattattatcccaaacaaaaagtgtaccatcgttaacaatggtactgtcttgataggcaatcatttcagtaccaatggcatcaatgaccccttcattaacaccggtcccaccattagttgcaacgatccctcctccattcccataggcaggaagaactccagttaatttacccgttttacctaatattgctcgtgcgttattggttgcatggagaacagcaagcagccctacattttctttgtaaggagttgagtctatacgtcccccagcggtcatatccacattgtaattatgcttggtgacaataagggccttattaaattcagcatcatactgcttataagaaagcgttttgtcctctagtgactttatcaaatattgattatattgctttaaatcatcaagagagttaatatggtgtacttttcccgcccaatcagtaattgttccagcatatttcattgagtcaatgattttttgagtaacgccgcccccctgcatggttgcaccaggctgaaaataaaaatcattgaccgagttccatacaacagaggaaccttctccatcagctacagcaagctgtgtatttttaaaaaaattaccgattgctggtgaacccacatccaaaatagctgtaccgccattattggctgttacaaaacgtgtcgcattgaaaaaatccgcagtgccactaaaaccaggaatggtttcatttcccccagtccccgcatcgcgttgtgagaaagagtcagtatcaaacacttgaagtgtttgagaagcgccagtaacctcatccttcactgtaatggtttttgttttttctccggtattgacgtaaatcaatccggataaattatctccagtggtgtagccatttaaaattgcctgttctacagtcatccagataagacctgacccaccagactggacgacatttggaccagtgatgtattcggttttaccacttactgttgcagccccaacacccgagttattcgtacccggacgccagtctggtgacaatatgacatctgccattgcgttattgcaattaattgcaatagcgccccccagaaccattgctgataaagcaattcctaagcgagttgatttacatttttttctacaactcgtcaattctgaaacaacatcccatttttgggttgtatggttccaaatgactttatatactttattcataacactaatactcttgaacgcacattataattgaatattttcactaataagggaacacggaatatttataaattgatgtaaacgttttaccccgagtttatccatagctctacgacgatgcgtccacacagtcttactggatatacccaaggtgttcgagatccatgcaatatcttttccttccttggtatatataaagatacttttctccctcggggataattgtcgttctaaaaaagaaactttatgattcgcgcgaatattttttttgcacctccagccattgataaatttatctatatagaaacaaaattgctctgctgttaatttccacggtatgaaaggtatgcctttattactaactacaccattatccccccatgccaggcacggaatattgacaggctggctttttagccattggtgaatgaaatacagtgagcgtatacaggtagtagaatcattatcagggaatacaggtaacaacaacgattgctcatcccgaaagcaagatgtgccaaaatcacgaatcagagaagaatagtcgtccacagcgatgactttcacgtacgaaaaaccccgccaacgcatactcttaattgcttgaattataaaagtattttttgtagtcgtaatcaaaaccatgcaatcaatttcctgttatcccctttcccaatttccttttgctttgcacaccggggggagacaaaccttgaggcacaggtttacaaaatgacccattttgacaacatcaatttaattaactacaaatagcacaaaacgcaggtaaaaaacctgcgtatttattttaattcagaatataattttgattgttatttacattttggctttatacgccagagattaaaaagaagacaaacctacctctttatgtgtagattgacgccgcacattgatctaaatcagtaaatttaatgttttttatagaaaaaaatgtttttctatacgagaatttctaaacaaagattgggtttacattttgggtcaaaatgttgcttttttgcgtcacctatcccccacattttttcaaatctcattgaattagaagcagtataaattaccgtatgcctgatattacgatgcccgagatagtcctgaataagacgggtatccacaccattatctgctagtgaataaccacatgcatggcgtaacatatgtggatgaactttaatatttaaacctgcatttttacccgcagcagaaactatgttataaaatcgttgtctcgataatggttttcctgttcgggaaacaaataaccacgggttatcattgaaatgtttaacatttaatgaattcctttcattcagccagtttgttattgcaatcacctcttccttttgaagtggatggactgtactgaatccattttttatccgttgaatatatattttttctgtagttagttctaaatccgacaactgcagagataagagctcactaacacgcagaccatgaaaataagccaataaaatcatgcaaacatcgcgtgaagagcaactcttttgttttacagattgaagtagtaaattaatttcatgatgcgttaaaaattttctgttttgcataaatcacctctatttatatgaaatagccatgtcaactatgatgaaagaattacatttagtcaataatataattcatatagttgctgtatgattatagattaatttattaaaattcacctaatctaattaatcgcttgtaaacgcatataaacaaccttcgttatgtaactatcgttcaaaactctcttgtaaatataaagagccctataagatgattataaaaaagtcctacaacccgaaatagcattccctcataaaattaagctcaacatcggcatatttaaaaagtatccaatgcaattaatattttatctaaaattaacattgtatcttgtatatattacatccatgaatgtatggatttttttatttaaaaattaatgcactataacaaaaaacatcaccaagtgttaaaactaacacaacaattaaccaaaataatatggctgtttatttttcatccgtaaacaaaaaggtacaaatattttcaccacaaaaaaaccaccagcatggcattgaattaccattcacaatacacacctcctttcgcttatttatgctcattggttgactaataatgatctataccccctgggcaactatctctctggcggggtattgatgaatatccatttagtggcataatttaaaccccagctcattatttgcttataaaaacaagcaataataccaggctctggtatttatagttcattttttaacttaattaatataaccgataatattatgcgcaaatttattactcatagtgaatggttgttattttttgaagccatcaacggttcaaaaaatgaaattagagataaagccatgttacaaatggcatatgtacatggtcttagggtaagcgagcttattgcactaaagattagcgacattgacttttcagagtcagcaatatatatcaagcgtttaaaaaatggattatccacagtacatcccctgcaaaaagaaactgttctgttattaaaaaaatggctagcactacgtgataacatagtaaaaaaaccttttgaagactctttgtttctttcttgtcaaggaaataaaatctcgagacaatatgtgtataagatgtgtaagaaatatagtcacaatatgaatattaatattcatcctcacatgcttaggcatggttgtgggtatgctttagctaatcaagggttagacaccagactaatacaagattatttagggcacagaaatatacatcatacggtattatatacagccagtaatgcagcaagatttaaacgagtatgggagggtgatgtgttagatataaagaagatataacccctgttctaaaggcctcaattcattgaggcttttagcccctcatttttatgacatacaactgataatcataatggatctcaatattaatcaaaatgagaaataaatcacctttttattaaaaaattaatttttttaaagtcacaaaccaacacatataatatttaataaaaatgccaccagcaaatatattgccacttatcttttctctggtaatctagtttactataaattatcgctctccaatattcgacgccaagaagaagtggttattttatttatccttttcgtaactattgacaaaacaattcccatataaaaattgcaatttataaagccaacatacacttacagtgcataataaggttatttaggaaccagatgatttaatgtattataaggtataacattcatattgac

SEQ ID NO: 86 - DNA, 76 bp, Escherichia coli
tatgttcccctcaccctaaccctctccccagaggggcgaggggacggtccgtgcgctttttaggggcgcatctggg

SEQ ID NO: 87 - DNA, 11729 bp, Escherichia coli
tgtggtgattagtgaagtcagcgccgtaacaaaaacccgcaaatcacgtaaaaaaacgtctaatccgtagaccggataagaggcgccagcatcgcatccggcaataactcccaggctacgccagatccgccatgctggttactggaagcaggtcaccagacccggtttatttattagcgtgatactacaatcctgtgctccagtaccttcgtccatcccacactgttgagaggacaaataaggaaaactgggtgaagacggccatcccagtgaattaaaaacagtatgcaacaactctaattcattgtatgtcggtgcattttctatgctgccacactgccttgcgatatcccatttactggcatcaatgatatgtgcagaagcccagttttcgtagttaataatcggtgaggatacgggattagccccggacggcaattccgtcgttaacaacggtcgatgtagcgatttactattcaccactaccgtgtctgccatatgtccccaaaagtgcgccgaggaaacatttgggctggttggtaccgtaaaaatagcgtccagcgtgtctgtcgcggaagcgtaattagccagagtaaccgtcagtggcgttttataaccaggggtattatcctggcggagcgaaaaacttgccgtcccatccgcgcctgtcatgccactaatggtattaccgctttcactcagcgtaacagccgaacctgataacggctgaacgacgagatcgtccatcgccactacattgccatacaacgttgccccagcgttacgcggcgatgcctcaccacgtttcaaagtaaattcaacattcggcaccgtattcccggcgctgtctttcaccgtcacggtaacggacatggcttcgccttttttcactttcgccgcctgagtggctgcatcaaacgctgttgaggtaagtgtgacgctggaaaccgttgaacgcgcgttagccaggcaaggctgaaatgattttgttgaacccgtatacagcgtgccatttctcaaatcaaccgactggtctttaccatcggcggatttatcctctgcccaccaggtgtaatacgcaggccagccagtttcagtgacaaacgtgttattcggataacgcgcagacaacgaacttaaatcattgaatagtggctgccttgctacttcacaagggctcacactcgcatctgatttctgtgttggggtaaagtacggccagtcttcattattgttattgatcttgccgacgccagaagtcgatgtcagttcactccacaatttcgggcgttcaaataccgcaccattcactgccgtcaaggttgctggcatatgcccccagtagttagccttcgcagaatccgggctggtcactaccgtgaatatcaggtcctgattagccgtaacctgcggatttcgcgccaatgaagctgtaaacggcgttaccagaccaacggtgttattttgggtaacgttgaacgttatcgtgccatcactgccggtgaagccgctccatgccgacgtattctggttgaaggagatacgcgccgatgtcggggtgacttcatctaaaatgagatcatctacggtattggaggatacagagatccctgaacggcttttcgcctgcacgcgcttgagcgtaacaccttcgccgccaacaggattaccattggcatctttgatcgtcaccacgatgggaagcatctcaccttttttcacagatgacgtgggggtaccaccattgctggcagttcggccctcatcataggcagtcgatgacagcgtaaggcttgctggtgccgaatgtggctgcgtcagacagagcattaaagcgtatccattaatagtcgtcgtcgattgtcccgttttcaaattaatgacgccgtaataccacgtcaacgcgtcagtggtgctcatttcataagtccaccaatttccacttccggcagttataggcaaccccaaatctgtcagtattgtcccgcctggatgatcattatatagcccctgtaactcattgagacgcggctgatactcaaccgggcaatccggcgtaactttattggtataaaaaaggtatgaccacgactcattattattacttaccgaggaccccaaggtcgcttctgctgccagtagcggtcgtttaaaggtcacccccgccctactggtaaacgtgtcgggcatatgaccccagtattttgctttcggtgagttcggactggttatcacagtgaaaataacatccatcgtggcactttttgtggtgtcgcgcatcaatgttgcagtgagcggagttgccagcccataagtctcgttttgcgtcacatcaaaagtcgctttaccatcacttcctgtcgtcagaagtgcctgtgccccattattatagagtgacatgtttactccggcaggggtgaccggcacgatagtaagatcatcatacgtagaatctagcctgttttttgcacgatccaacgcagtcccgcgtatgagattaaagtttgcgcctggcaacagatttcctccgctatcccgcacaatcaccgtcatccggatcgccgtacctttcgccgccgttgcactagggcgaccatcgttgctggccgttttctccgcatccagtgccgtggaggtcatctctatagaagctgccactgcatgagggtttaccagacaggacacaaatgccacggtgtttgataatgccctggagcttgatccattcgataaattaatagactgatcgtaccagacgttcgcgtaggcaattttatcgtaagcccaccaggtgttagtcagcggaaggcctaaatcggtccctatcgcaccattaggatgttcactgtataactcttgaaattcgcttaataacggttgataaggttcgccgcagtctgatttgctgacatcattttttgctgccgtattcaaagaaagccatgattcattattagccatggttgactgccccgctggatgctcggcagtaagcaatggccgcttaaaggcaattcccgaccgggtagtaaacgtttcaggcatatgcccccagtaacttgccagtggcgtatccgggctggttatgacggtaaacatgaccggtaatttgttggattctatcgtcagctgatacaactgggcgtacatattggttaccaggcccatagaatcatcttgttttaccgtaaaggaggtagtcccgtccgcgccagtcaccccataaagcaggcttgaagaactattcatcctcgcagaagcgcctgccgcgttaattaccgtaatcgacttatttatcatctcggcattttgacggttcttcgagccttcacgtctgagaataaaggggacattgggcacgctatttccctgcgcatttttagtcaccacgcgaatcaccgcgtcttcgccttttttcactttcaacgcactcaaggtgtcgtcaactttgacaaattgcgccgtatcattcgcctcaacaatgatctgactggcaacggcgacaggcgtggtccggcagctcagtaatgcaccaccagatgagggcatctgcgtttcatctcctgtcttcagcgaaacgacatcatacgtaaaggtttgagtgaacgtatctgcaacggtattcgagatatagaacctcgacactggccagccaatagcatcatgtaatgcgctactcccctggtgcgcataaatggccctaagttcattgtcagttggaacatactccgcgccacaaccatttatcgaggtatcgttagcctggcccgacgggaacgtagaccaggcctccccctcttccaccagggtaccgatactggtggtagcactattctcgtccctcagcaaaggccttcgataaataagaccgtcatcgcctgtcgccgtttcagccatatgcccccagaatttggcttttggcgaatccgggctggtaagcaccgtaaagacaacgggaagcgtcgatttagtgctgctggaggaatccaacgctgccgtgagttctgtttttagcccggtagtctggtcttgcttcaatgtgaaagtggtggtgccatcagcccccgtcacgccataaataaccagggtcgttgaaagaaaatcattttgagtatttccccaggcatccgttaccgccagtgaagcaatcgacgtcgtagttgacacattggccctgttcacgctggtgtttcgtttgagggtaaatgcggtatttcccacaggcttaccctgcgcatctttagtggtcactcgtaatacggcttcttcaccctttttcactttgacaacattattcatacggtcaaattttgtgaggtctgcagcttcaagaacgatttggcttgccttaacaatcggcgtcgtctggcaggtaagcagttcttttgtggcagatggaattatcgaactggtgcctgaactgagattgacggccttgaagtcacgctgttccaggctactactacctgtcgtgctggaaaggtaacttgaggcgacgggccagccctgaaccgttttcatcgcatttccgcggttggcttcatacaatgactccagcccggcctgagagggaacatattcactaccacaaccattagaggatgtgcttatagcctgagcttgggtaaattgcgcccagtcttcattatcttccgcaatcgctgttcgacccgacgtactggataactctttcaacaataatgggcgtttaaagaccgctccatctgcagccgtcactgtttcaggcatatgcccccacattttcgccttatcgctgtccggactggttacaacggtaaaaatggtatcgagggtcgcttttttcgttgtatctgaatagagcctagcggtcagcgacgttttcgtgccatgggtatccgggcgggtaatagtgagaattttagttccgtcgctgccggtcatggcgctgtatgctgcagcggtattattaagcgaagtttcgtccgccaggccaccattgaccacaaccggcgcaaccagcgcatcactgctaccagcaacgtgtttttcctctgagcgggtataaccatcgccacgtttcagggtaaagggtatatcacccaatggattgccctgcgcatcttttaccgtcacctttacctgtagcgtttcgccttttttcagcttcgccgcatttgcagccgcgttccactgcgccggatctaccacttccagcgtaatgctgctggcaggattgttagccgtcgtcaggcaactgacataaaccgccgtgctaccgccaacggtccgcgccccatcgttgagggctatggtgtaataatgcggtacctgatctgcgggcgaactgctccagtagggctgacgctgcgttggccagccgtgtactgtctgtacaccgttaccgttattggcatcatagagcgcgctaagctgagaacggcgtgggagcatattggcgccacagccacctttactggtgctggaggcgttggcctggctgactcgcgaccagacttcgttattttccgttaatgtgccgtccggactgaacacttccgcagccagtcggggtcgggcaaaggttaaagcatcgacggtaatcgtctcatccatatgcccccacatctgcgcgccaaccgcatccggactggtgagcgtagtgaaaatcacattgtaattaacagtattgggaatataggagttcacaggcacaatatttagcggcgtcgataagcccacaccttgcgattgcttaatttccacagtcgcaaaaccctgcgcatccgtagtaccggcatagactaaagacggttgcgatgttccgtagagtgtgccattcatctcgattgcgccgcgggttggatcatcaaaacctgtagtctgcccctgacgatttttccccatatctttagtgatggtgaacgcggtatacggcacgggtgcattattcaaggcattaaaggtgcgtaccgtcatggtgatcgtgtcacccactttggcctgcgctctgctgcctgcggaaacatcacgatcggtggtcgcggcaatcttggcgaccatctcattgcccgaacaagagagatagttttgcttaaagccggaataggtgtcgatgttgcccgtggccaggtttaccgacgcgtgcgacgtctcttccaccgcactaagatacgctttttgcaacgttggccagccatattcggtgccgatggcattggctggatgagcggcaaacaaactgtgcaatgaactttggctcggaatatgacctaaaccacactcagcctgcatactgctattctgatcaaacagcgcccagtcttcgttattttcccgcaccgatcccagttcgttgtcggtttcatccgccagccgtgggcgtttaaagatattgttcgcttcaataatgcccaacatatggccccacatccgcgctttgtcggtatcggggctggtgatcaccgtaaaaataacgtctttctcatccgaggcagtaaaatcactgcgcattctcgcggtgatgtgagttttcacccccacgccgcctggctgggtcagcgtcagagtggcctctccgttagcatcagtgatcccttcataggtatgggcgtcaactttgcgaacgttactgccgccatcaatttgtaccggatgcgtctcccacgcggcgtcagtttgattcttacggttaatgccgtcatccagatgcagcgaaaagtagtagtaagccagcggctgatcgttgttcttgctatcggtaatcgtcagacgtaaagaagcctcttcccccacctttactttcatcgcttttatcgtcgaatcatagctgcccggcgtcagtaccagcttcggttcaacatcgggcgcttctttatcgacacagctcacaataaacgtcgtatcgtccggtttttgcgcttcgctgcggttcgaaacatccgccgcatggtgctggccgctcatccccgccagtgatgaccagtagaaattaccctgcatcggccaaccagccacatcctgcactgacgttggcaccaccgtcgccagcgcaccgaactgacgcattccgggcaaaatgtcgcaatgtttatccgcgccgctccaggtaaaggtggaccaggtttcattgtgatcgttaaccgtaccgccttcattatcgacttccgccgccagttttggtcgactaaaagtgtaatcacgggccttcagcgtatcgggcatatgaccccacattgtagcctgcggaacatccgggctggtgaggacggtaaagatcactgccgtttcactggcctgagcaatacccgcgaggctcgcgaccaacggcgtttttacaccagggccgttggcctgggtgaccgtaaccgtggcaacaccattcgcatcggtagtaccacgatattccgtcgcggtggtggttaattcggtcgtgcccagttttacaggcgcagtattgttcaccacaccctggcggttttcagcatctttgcgtttgataacaaaaggaatattccccacaacattaccgacgcaatctttggtggtgaccgttaacgtgatactgcccccaaccgtcattttcgccgcacctgaggattcgtcatagcccgcagcgctgacggaaataaggtcaccctgcgcgggcgcaatcttcagcgtcactttctgatcggcgagcgtcagaacactttcatagggatagcccgtcgaggtgagtaaatataacagcggcatggtctgctggggatcaggctgcgcccaggcgaccagcgaacgcccggcaagtccctgtgcacaaaacgagcgatctgcgactggctgtgggtccagtaaggtgtccggcgtggcggcatccgcccaaactaaagatacagccggtggcgtttggttttcccaacgtggggtggcaatgatatcgccttctctgtcttgcgggttggtgacgagcaatttagagacgctaacatccgcgttgaattcactcggtttagcggtaaacgctacctcatgcgtctttgtaggatccagaaagacactgccctggtagacgggtatgctggcgctgtcggcggtgggcacggtaccgttaaattcgccgaccgtatctgaagagtcttgccatgcagattctgcccatgaccacccaggcagcattgcgcttatcagcaatgcgcataacacaaggattttattcagggtcagggacatgacagaaactccaccggttgttaaacggacgcttgtcgcatcaacatattttgcttaatccgggattaagcaaaatatgcggaaacagcattcccttgcgggaatgctgctgagtacgcgttatttgtgtttgtaaataatgtgaagtttgtaaccctgtaccccgtcgccgttggtcgggatggaaagtgcctcttttccatcgcgcgcagggccgttaaggttggttctggcttcgtcgttggtcgcagggatgaccaaattgttattatcgaagcttgagttaacgatgccacccgaagtgccaagctgttggctgctgccagaaagtacccaacggaagtcataattggcggtgacgtcagcatcggtacccgcatcaaacttgccatttttgttctcatccgagtacagtttggccacgtaggttttgccaagttcgattggtgtgctaccgttgataaggttgatactggtaccatcaacaaagatggcgactttcaggttctggttaaccaccggccccggtgcaacgttatcgctgtcgcttccgccgccgctggcagtagaaacgtcataaagatgcagcgcagtcccgacgtttggcgtaccggtctgcgtggttggcgtaatttcaataccgatatagcgaccacggtcggcatcggtaagagtgtaactggtcaccttcgttgccagctcttttggatcccccccctgcgcatccttgtagctcatccagcggatagtatcgatagttttcgcgttatcgcccaatccaccaagatccacgtcgccttcggtatcaccaatttcccaacttacggttaatttatcacccgagtaaaaacgcttgtccgtttcamtgccttgcgggcgagcgccttttagatcagaagtcaacggttacacggtcggcatcatgtsgtagcacattcccccttccgaatagagccacggaatggtcccctggaaaatattggtttcaccgctgtcgacccaggcgctgtcttcagccagcgccacaggtgccacacaataacctgccagtgccagcgctaatgcgatccgggtcagaccgcgtcttttatcctgcttcattgatgctctccttaatgaaccttcagcgactggccgactggccttacgccaatcttattttttggtatacagcacgcgtaaaccgtatccctgcaagccatctcccgcttgtgcgccataggtttgcgccgcttcacggttagtggccggaatcacaatgtcctcattggagtgttcgcctgtgcacccacttcaccattgatgctcttgccggtaaattcccacttgtagtcgtactgcaccatctcttcgtcagtcagtttttcgacctgctggaagacaccgtctttattgttgtcgcgccataaaacaaatcgataaatgttgttgarcggcaacggttctttatctttacctatcaggttgctgggtttagccgcccccacacgatagataaaagcatttagcccaccaatttctgccccgaggaaagtgacatccacatagttactgtcatcgtagggcgcggcttttgctttccagcgataggtgccaggtaaggtactggagagggtgacagtgcccttttctttatcttgtttggcaataaaaacgcaggggttatcggtcgagcagggcttgttggttaacgtcactcgtttgtcctgcgcgtcgtaaagctgaggcgtaaggttatcttccggcaacgcatcgccgttgcggtcggtgttatcgccaaagctgtcggttacatcgagatccatcactacaccatcaacgccatctgcctgtgcgctggcttcgtggctgtggttgttctcttctggcacgttcgcgatgttattaacaatcaactctattttacggtcctgctgaacggtgatttccaccacgccagagttctgtcggttgcccttttcatcttccagcgccagacgtactcgccaggtattgagtttttcttgttcggcttgatcggaactgtactgccaggcaggcagcaccaggttccagtggttattgttaccctctgtcagagtattctctttgataaccggcatcaccagcgtgcgggcggcattgtttttcgcctgccaggaggccgcaacgattttgtaatgatgattaatgagtgcgttaatggtccacttacatttttccagaccgacggccgcttcgggagtgtccttaatgacgcactcagggtgctcgttggtggcatccgctttcaaccacagggtgacatcaagcggatctttttctttgtattccagaacaataaagttattacgctcaacgaaatcaagacggctgcccatcagcgagtgcgccgctttcactttatcgctatccaattgatcttttagcggaacgccgaactgataattaagagtggcattaatgctgacatcactgttatctccggtccccgctttatagtccgtcccaactgtcagtaacggcactggttgataattcagtccaagcgttaccgcgtagggatctttctccaaattatccgtaccaaaaagggcgacttcatcgccgtaatattgctcgaagacaattttgccccccagttgcggataagaaggtaaccagacttcggcacgaatatcccaaccgcgcgcagggcgttcttcataaaagtcgaaatcttcagagtctttccagtcagaaagtgggtgataatagttgcctgagaattttaaataatccgtccaggcttcggcgcctaaacctaaacggcgatgtccacgggtaaagtcataatcataaaatatatttccacccaatagatatttatcaaaattataccttaccccaaggccaatattcccgatcgtacgatcttcttttcgttgcgcagaaaattggctgaaataaacagtggtttgattatcgtaccagggaacaaaataatcgatggaactgccatccagatcgccgccctgaccaatggagaggttcaaacggaccttaccgtagggagagagtgtgtcttcaatataagattgtgcggttgaggtgatttgactttgcagatagcttctggcctgagattccagcgcctcaggggtcaagttttcaaacccttgcgtggcggagttgatgacgtaatcggctccgcgctctttcagcgatttacccttgttggtttgttcatcctgttgtgctgcctggctacctaaatcaggtaacgattcgttttgcttaacatttatctctggcgccgcgaaagcagcaccagagataaatgttagaataatacagcgtttccatcgcagcatgcactttccctgtgacaatgatacagtcaaaaataagctttaatattgtatccctgattattcagaaaggcatgtcataaagagtaaatatattcttaattatttaaattagtgatttcactcaaatacattagttattccactaataacagattgtttatcattcatatattaaatataaatgataaaacaatacattcacatgat

SEQ ID NO: 88 - DNA, 198 bp, Escherichia coli
cggttatcctgcatatcaggaaatgacaaaaaagagcggcccacaacacaacatgtaaaaaagaacgatgaaacaggtgaaaatcgcaatttattgaactgacaaactcatgtgagacggataaggcgtgcatgtcgcatccggcaggaaacaataagcacattgtcagccatctgcgttatgccgttataccagaaa

SEQ ID NO: 89 - DNA, 112 bp, Escherichia coli
atccggcctaccgctccaacaccgattgtaggcctgataagacgcagcaagcgtcgcatcaggcatcgtgcaccgagtgctacaaaatcgaaattaccccgtaggcctgtgc

SEQ ID NO: 90 - DNA, 14066 bp, Escherichia coli
tcatrattgctcggtgtaaggacrgcwccaacaaaaacaggatgttagcagtctcagcaggaccagggccaggcggtgaagggacaaaaaaggatacgcaaaggagccgcggctctttagttacatgaaagcccgctaatgcgggctttttttatgggataagacatatgaaccaactgcaagaaatcattcagatactaagtactggtgatgaaggcacaacaaatgctctcataaaaacgaagatccttcttttctctatcgggaaaaaggagcttgctgcatgggtaaatcatgagataaacggttatcctgattcagtttcccttccagattatagaattgttggcacaagaattcttgcagatctgaataacggcgttcgcctatatagagcttttccgttaccgattggttatctaagtgaagatgactatgaagatgctacaaccagtaatgtgaggctttcaatcagtcaaatcgaagaactagtgaccaatgctggtgatagccatgctcttcagcagccaattcctttagattacgcgttagttaagtactgcaaaggtatcgataaaggctatgagttaacacgctgttataaagagatcgcactacataactttacttccatcttaactcaggtcaggtcacggctacttgattttatacttgaactttctgatcaagtttctgaaataccagatgagaaaaacatgacagaaaaacttaaaaatatcgacacgtcttcattattccataactcaatttttggagacaatactgtcataaacttcggaaatgaaaactcattttctgtgaataaccacgtcgtaaaaaacgacactgagtcattaaaagagtttctctcagctcaggggttccctaaatctgatgttaacgatttagaaattgctattggtgaagatggcccgatagctaacaaacgtggtgaatatggtcaatctgttagtaaatggttggcaaatattgcgagtaaagcagcccatggtactttgggcataggaatagctgctgcaactcaagcagctacagcggctctgaaaaaatactacggtctatcataaccatcatggggtgtcgggggtcggaggttcaaatcctctcgtgccgacaaaaaatcccttaagaaccagcctattatggctggtttttttatgattgttttttatgcggagaaataccggggaataattggggtaaaacacctttaggctattcacttagcctaccaccatcaaaatctttccgaatgtatccatctcttttttcttatgcagctaaaacgaagtcttgatactgtttatttacacagataagaataatactgtctacaaacgcagtacaaaagaagtgttatgcgtattgagatctccatagccaaagacaaaatgaccaaatgccaaacggtgctgtggatgcgttaaaggaagaattaactcgacgcatcagtaagcgttatgacgatgtagaggtgatcgtaaaagccaccagcaacgatggcctttctgttacgcgcaccgccgataaagattcagctaaaacttttgttcaggaaactctgaaagatacctgggagtctgctgacgagtggtttgttcactaattaacacgtaaaatcggtaacggctggaaatcattcaatactcgcactatcggaagttcaccagccaaccgcagcacgttcttgcatacgacgtgtctgcggtttttcaaccatttagatacagcactctcatcgcattcattcttccgcattaaagtatatatgaccatatcaccttaatatttttcttcttcagataaaaattgttatctatgtatacttttaaaccgaatccgtgtagagtctctacctaagttagttcacagttaccccttcagtttgcgccattaacctcctgacttttgccgctatctgtaagcattcctgtatacctgaaactacaggggtcatctacgaactttaagaacacccaggataaaaattgtcaactatattatatataacaccatactaattcgaggttatatgaacagcatactgataatcacttcactacttatcatattcagcatttttggtcatgctctaataaaattagggattggcatatccaataacccggacaaaaccgatgtataagtcaacatatccttaatcagacatacaatattgcaatgaaaaccaataatattttaaggaatatcttcatgaaatcaaaagacaccctaaagtggttccctgcgcagcttcctgaagtcagaattatcctgggagatgctgtcgtggaagtagcaaaacagggaagacctatcaataccagaacattgcttgattacattgaaggaaacataaagaaaaagtcatggctggataacaaagaattattacaaacagcgatatcagttcttaaagacaaccaaaatttaaatggtaaagtgtaacccccctgaaaaataattttttaatgcattaaaaaatatcaacaactacgttatccctcaacaacctacttttttaccatttttccactttaacaacattttgctccacttttccacgaccaaacaacttgaaatctggttaaaataacatacaacactattattcgtcttcctcgagtccgcccggatttcgaaaaacaaaccgagttaaagccatttttcaaaaaatcgattttgggttacaccaaaattacgggactgcatccgaattcgtttattttcgaacgtatacatacaaatatgtacaataataagcgaaataatttttggatatgcattatgatatgtacaccaatttcgtatagagtctcactatgtctcgaatttttgcttactgtcggatatcaactctggatcagaccaccgaaaatcaacgccgggaaatcgaaagtgcaggttttaaaatcaaacctcagcaaataatcgaagaacacattagcggctcagcagcaaccagtgagcgtcctggttttaaccggttgcttgctcgcctgaaatgtggtgatcaattgattgtgacaaaactggatcgccttggttgtaatgcaatggatatcaggaaaacagtggaacaactgaccgaaacaggtatcagagtgcattgcttagcattggggggcattgacctgaccagtccaacaggaaaaatgatgatgcaagtaatttcagcagtcgctgaatttgaacgagaccttttacttgaacgcactcattccgggatagtaagagcccggggcgcagggaaacgttttggtcgaccacctgtgttaaatgaagaacagaaacaggtggtattcgaacgaattaagtcaggtgtaagtataagtgccattgcccgggaattcaaaacctcgcggcaaaccattttaagagccaaagcaaaacttcagacacctgacatataaaaaataatctcggtgtgagatgctttacgtcttccaagcccccttccttgccgtaaatggaaagatacatctaattatagaatttatatgttttaccctacggcagtgctggccattcaatatcctgtgcagttgacgtatcaacacggttcagcaacacccgatactttttccaggcttccagcaacggggtttcttcctccgttgcatatacagctcaccttttttcacccacgattaaccaacagccagaccagcagacacgccaccaccggcacagcaaaatccatcaggcttgccacatcccacacgcgcggatcaaaaccgccccaccacggcatgttaatcctcttgccatgcccaaacatttcaatccagcgatattccgcctgggtgtgttcacgcgcaatgaagaacgtacaaccggctatcgccccgtaagcccagttcccggtaaaaagaccaaccagtagctgcgcagccacagcacaaagcgcatgaaggaaaggtgttatatccattttcatcctacccaataaaacggggcgctcggccccttgatattatttagacgcaagcgccgcctcaattgcagataatctttgtcttaattctgcgttttcttcttccagtgctgttattctgtcgtctgactctctggctacctgaacaagcaagccagtaacaccagaataatctactgtgtaataacgttcaccttcttcaccttccgatccgcttgcaccgtcctgatatttcattgcggaacctacaacttctgggattgcttccagagcttcctgtgcaatgacaccagcatagggcataccgttttctttaagcgtgtatgtatagccgttcattttacggatgcggtcggttgcattatcgatcacctgaatgttgtctttcagatcccggtcggaatgctggttaaatgcggtggcatgacatgcaccattaacgcttaacatataggtgttatcggtatttttttgcgcatagaacatataagcgccaccatcaacaccgacttcataaacaacaggacggctggagttgccccacaattgagcagtaacaccagcataagcggttccctgtgtgtttaatgtcatggttgacccatgattggcatatttgatctgtaatgtgtcggtgtaatcaaatttaataagcgcgttacttccacgcttgctgtatgacataaggcagttacccattttgaggtatccgctgtcacctgggaaaaatcatcgtaccgccataaaggttggtaaagtcccagcaaatgtttgtcccgttatcgttcaggttaaggcgcgccattgcgttacctggactgtctatccattttttgaggtatagttcgcaatacgcatcctcaacacctgccgtcctgtgagttgagcggagttttctcccaaatatagctccgctagttggcaatacctgctgataccatgaagcagaccagtcaccaacgatttcatctttgctgtctacatataattttgttgcgtagcttccttgatcgttttttaatttgctaacgtcggattttagcgttttgatgtcatcaggaattactgtcgatgtagccatttgtctccctcacatccagccacgaagttgatgctcaacaacaatcgcgtatttatcgaatattgacgatttttttgcatcattaatgatgcgcacgtttacaaaatatccgtcctccttaacacataccggttcgccatcttcagtcagttctccggtttctttgtacacgttacctatcacgtcaataagaatatcaccctgcatcgactcgtcatcataatagccaatactctccataaaggccgaaaagtcggccctgtctgcaaatttgagcgttaaatctttcatttaatactctcccccatttgcgcatcagttaattctttatgccagagacgaagatttctcaaatggccgaatagatgacgagttcccgatgtggcttgacctccaattcgaataaaggtccgtgtttttacgcccgtccactccgttttcatggttttagtagcctcaccgttagaaactactcgtttagtaccatcagaataaatattaaaaccaccaatgaattttcgaacatcagttcgaccagcaaacacactagaaacgtaagtacttgtcgacgctttataagtttgcatataaagctgaccgtaatatttctcagttgtgttaaaagcgtatgtaattgactcaataggtggcacaccagaaaaatcaaaaatacgcggtgctacattaggaggaatatcgccccaatttctattaacctcgaccaggcacgtaagcggtctattatagatattattttcagttgggatcgtcaccatatcactggagcgggttgcgggtacagttgtcgtaataacaaaagatgaagcacatccgccgttttcaaattgtggtgttgcaaggtaaatataatctcccgcttcagttacaccaccttttttcggcgcatactgaatcattgcgccaattaaggtttcaccttcaacagcttctatagttgcctcatagaaaatccaccctgtaaccggatctttagttgcagtagctgctattctattggctgctccgccagttttttctattatcagagttccgaaagttaaataagcatctcctaaaaatgtataaaccgacccatcgtatttttcaaaacgcaaacgacaacgaagaccatcaggagctttaaccctgcatgaaacagtgcaatacttattatcgccactaacatcaatcccccgggatgcactgcatgtatgcagactaagtgcagatgattgtcctgtcatattatcttttgttcgcattttggcatatgaaaaaccaaattcatcaacaccattattagttttatcgatattgctggtactcgtccattcagcggggatattggatttaacaaaatagttagtgcgctgtccttcaatcaataaaccttctttttcaaatcgtggctcatcaattttagcaacactaaatacgcctgatttattgatatatgtggcagttgatgcgcgtttaaactttacaaccttatcgccaggcatcgttatttcatcatcaccaataacaatctttttatatgacggcgaaaagcccgtaatcatatccagtgaatcgttaaacggtatccacacatcgggaagcggctgcaaaacttgtttatacggctccgcagcctggcttgcatactctctggctgcgtcttcacttgcttttgcagccgtctggcttgctgccgatgctttcgctgagttagccgccgcagtctcgctcgcctttgcgttggtttcactggtttttgcagctttttgactgttggctgatgcagaggcagaagaagccgccgcacttgcagaaccagctgcggcactctcgctttgggctgctgcatcctgactgtttttcgccgcagtttcactggctttggcattcgtttcgctggtcttcgctgccgtctggctggactttgcgttagtttcactcgtcttcgcagctttctggctgttagccgcagcagttgctgatccagttgctgaagtcgcagaaccggctgccgcgctctcgctttgggctgctgcaacctggctgttttttgccgcagtttcactggctttggcattcgtttcgctggtcttcgctgccgtctggctggactttgcgttggtttcgctcgtctttgcggctgtctcgctatttttcgcgttggtttctgattttttggctgctgtcgcggagttttctgatgcagtctgtgaggtcgctgccgcctgtgcactattagctgcattcgtttctgaggttttcgccgcgttcttcgatgatgccgctgcagtttcggatttctttgccgccgctgcgctctgagaggcggcttcggcgttgcgtgccgcttcttccaccatttcctcaaaacgacgcaatgcctccggcatgacatcatcttccgtcatggcaccgagaaaatcattcagcgtacctggtctggaaccttcatagacggtaatggttccggcatgtgaaggcggaaaaccttcaacaagcaggataacgctgtactggccatactcaacatccatgctgtaacgcccggcttcatccggattttcagaggccaccgtgttcaccagtaccgtggtgctgttacgctttgccttcagttgaatagtgcagttctgtattggttttcccgcaccatctttcagcacacctgagatttttactgctgccatatccactccacaataaatatcctccggcatagccggaggtttttcaaatgcgcctataaggctctcttaccagccgcgccctaacaggcgcacacgatctgacatttgcatccaacttcgttacttacggcccgtaaacgggctgcccggatagggaatcgataactgctctcccattttatcctcttcaagctggtgctttatgtaatcctgtatcttcgccgtgttcttacccactgtatcgacgtagtaccctctgcaccagaactccctgttcctgtatttgaatttcaaatcaccaaactgctcgtaaagcatcagactgcttttccctttcagatatcccataaacccggatacgctcattttgggcgggatctccacaagcatatggatatgatctgcacagcattcagcttccagaatccgtacgcttttccactcacacagctttctcaaaatactgcctattgctctacgcttctctctgtagaacacctgtcttcggtattttggcgcaaaaactatgtgatatttacagttccatcgggtgtgcgctaagctcttttcgttccccattgggacccccttttgatttcttgtttgacacttgcagttgccagaccgcaaagtgttttaacaaatcaaaaggggttttaataactggctcaaagctgaaagctttccggaacccccagcctagctgggggttttctgtgcacaaaaaagcccgcctgaaccggcgggctgtcataacactgtgttacctggctaatcagaatttataaccgacacccacgatgaaaccgtcagtgcgccagtcaccactgccggaaccttcataagcaaggtcaatggccacggattcggtcgggttaaactgcacgccagccccccacgccagagacgtgttgctgtggcgaccgtcatcacttccggtcagcacatcgtgcgttttccccttgttgtcagttacgcggagataatccccggagaaggtcgacacacggctgtaagccatacccgccatcgcataagcactgaaccattcattcacgcgtacagatggccccgccatcatgctgaaccagcggttacgcacggaatcttcatgccagcgggtatcgctgtaatgcgttttttgctcatctttggcattggcataactgaatgacgtcaccagccccagcgtgtccgtaaattcataacggtatttcacgttaatgcccttcaggtcatcactgcctggcatatcagtatgggtctgaagatacccggcgcttagtgtggactgatgctctgctgcgctcgctggcgtaccagcggcaaccagccagactactgcggacagaataacagcacataatttacgcataattacctctcgcttttctgcaataaaaaaggcgtcatttctgacgcccgtattggggctataaaattcagctgatactgatgcctgcggtggctttcttcatcaccacaaccagcaaatcgctgatacttgctgtgggataccagttatttaccagccatgctgacaccgaaaactccagcgtcatgtgaccgtgaccggcaggcatatcaataacgccactgtaaatcagcgtattatccagcgcggtacggttataaatttcagcaccgtttttccgcactatcagacggcatgaggagtaaatatcagtatgctctctctcatgcttagcgccgctgaatgccaccgccggaataacaatctgtcggtcaaacggctgatcgtcataaatcctgacggtaatggtccctgatggccaccgttccggtgcacgggagtcccgggggaaagctttacccactgttttaacgagatcgccttcaatctggttcgcggacagttttcccagaacccggcagttctcgttaatcgtgacgttgttgagcgtcccggagttcgcattcacgttaccgctgatatcggcatttttcgccgtcagccgcccgtccggtgtcagggaaaatgccggaggattaccgccgctggtaatggtgggagccgtcagatatttcaggaacacttcgttcatgaatatctgatcgccctgaccaacaaacatcggctttgtgttgccattcgcaggattaaccatcgcaatcctgtccgccgccagcagcacctgactctgcatgccgtcaggggtgttctcaataccggcaccaatacccgcgatataaaggcgtccgtcctgcatctgctgcagcttcacagcccacatgctgttcaggttattatttgtatcaacctgaaccttctgtatctgctgaattgccgcactctggtcttccagtttcttattgacggtctgcgtgatttcattgctgacatccgtaatggacgtcctgatttcagccaggtcaggcgcaagctgaccgttatcaatctgcgtccacagctcctgagccagatggcttttccctatctcgcctttgaaaaaatccagatagccggatgcatcatcactcggctggccaacagcctccacaaatgccgatttgccaacggtgttcacactgcggatgtaaaaataataatcatggcccggtttgatattgatactggcagctatccagtacagcgccgtgccaagatagcgggctgtggtttcaacctgcctgatatccgcaatccgcttttccgagaaccagaactcaaactgtaccgtcggatcataaacggcaagatggggcgtggcggttatctgaaaatagcccggcgtcagctcaatccgcgacggcgctgccggtgcggcaatccggaacgataccgatgcaggatcgccctgctgcccccaggcatttgccgcccggactgtcagcctgtagcttcccagcgccagctgcctgaagcggtatgtggtttccgtcgtccgggccgtgctgaccagccgctcactgccgtcatccgctgccacggtcaggcgaagcataaagctcacacccttcaccaccttcggcgtatcccagcgcgccagcacctgatattccccgctgtctgcagtgacttctgcggtcaggtgctgcaccgctggcggcgtgacaccattcaccgtgccactctgttcgccgtcaaagtgcgccccgttatccacgatggcctctttttccggcacatgctgcacggcggtgatggcatacgtgccgtcgtcgttctcacggatactcacgcagcggaacagtcgctggcgcagcgtcggcagcttcagcccccatacgctgtattcagcaacaccgtcaggaacacggctcacttttaccttcacgccgtcggtgacggactgaacctccacgctgaccggattgccacttccgtcaaccaggcttatcagcgtggtaccggaggatggcagcgtgatttcacggtcgagcgtcagcgtccgggtctggctgttcaccgccagcacacgaccactggtgctgataccggcatagtcatcatcgcagatttcaatgatatcgcccggtacatggcgaagcccttcagcacccacgctgaagtccacggtctgcgtttccagcagttccgttttaatcagccacagcccggcgcggtgtgcctgcccccgactggtacaaccaaaggcatccatcttcgtgacattacgaccgtaacgggcaatggcctgcgtatcttcaacaagctctgtcgccgtctcccagccgttgtccgggtcaatccagttcacctcaacggcattatggcggtccttcagggcgctgaagctgtagcggaacggcgcgccatcatccggcatcaccacattactgcggttataggtccacaccttatctgatggtcggtcctgcacgaacgtcagcgtctgcccgttccataccggcatacagcgcatcgccgagcagaaatcactgagcacatcccacgccttacgctgcgtggtcagccaggcattacaggtgatgcgcggctccgtgccgccaaaaccgtccggcaccgactggtcgcaatactgtccgatgacatacagcgcccatttgtccacatccgccgcaccaagacgtttccccatgccgtagcgcgtatgggtcagcatatcccacagacaccaggccatgttgttgctgtatgccggtttaaacgttccgtcccagataccgctgtattgccgcgtctgcgggttataattcgacggcacctgcagaatacgcccgcgaagatgataattacggctcacctgctgactgccgaactgttccgagtccacctgcacgccgaccagtgccgtgttcgggtagcactgtttcacatcgatgatttcggtgtatgacgaccagagcgttttgttctgcagctggtctgtggtgctgtccggcgtcatcctgcgcatccggatattaaacgggcgcggcggcaggttatccaccaccaccgaggccagatactgtgaggtggttttgcccttaatggtgatgtctttttccgtcacccagccaccattacgctgtatctgaaccagcaggcgaacttccgacagattccggtccccctttgaggtggtttccaccagtgcctgcacaccgaaggtaaagcgcagacggtcgatgtttgccgacgtgatggtccgggtaatcggcgtgtcgtacttcacttccgtacccagcaccgtctcggagccggaggattcaaatccctccggcggtgtctgctcctgctcacctgcccggaacaccaccgtgacaccggagatattggtattcccctcactgtccagcactggcgtactgttcagcagcacactttttaatccgtccaccggaccttcaaccggcccttcactgatggcgtctatcacgctcagcatctgggatgatttcaggttgtccttcgcttcgcgcggggtatgccccttactgctgcctttacccattcgtcatgatccataaacgataaaaccgcccggaggcggtttcacataaaacattttgcatcagcgaccaatcaccacaacctgaccaccatccccttcgtctgccgtgctgatctcctgagaaatcacgcgtgaccccacgcgcatttcaccgtacagaacgggcagaacattcccctgggcaaccatgttatccagtgaggagaaataggtgttctgcttaccgttatccgttgtctgtgtgcggggagttctggctttcggtgccagcatctgcgccacaccaccgagcaccatactggcaccgagagaaaacaaaatgccggtcataccaccggcaccaatggctgccccccatgctgcaagggtggctccggcggtaaagaatgatccggcaatggcggctgctcccaggacaatctggaatacaccacctgacttggccccggcgactctgggaacaatatgaatcacagcgccatcaggcagagtctcatgtaactgcgccgttaatccggacgtgctgacgtcccgcccggcaatccgtacctgataccagccgtcgctcagtttctgacgaaacgccgggagctgtgtggccagtgcgcggatggcttcagcccccgttttcacacgaaggtcgatgcggcggccaaatcgttgcaaatccccgtaaaggcagatgcgtgccattcccggtgacgccagagggagtgtgtgcgtcgctgccatttgtcggtatacctctctcgtttactcagttgttcaggaatatggtgcagcagctcgccgtcgccgcagtaaattgcggcatgattcggcaccgatgaaccaaagcagcacagcagcacgtcgccaggctgcgcctctgtcagtgcgacacggtaaaaaccagtcgcctccatattgccaagatagagattctgaccgttacgccaccagtcatccccgcgatgaaaatccggcatctcaatccccgccagatgataagcatcccggaacagcgtgtaacagtccgtcaccccgtgctcaaagcgacgcccggtaagatgtggcacacagcggaacttgtgaatcgccccccggcagaccagccaccacggcaaatcactctgcacctgcagccgccggtcagcctcactcagccagggcagaccaccgggatgactgtggaccagtgccacaatctcaccctgcatctctgcctgcagccagtcctccggagccatccggaaataatcctccggctcaccggaaatattcacgcagggaaaatatctttccccctccggcgctctcaccacgaagccgcacgactccgctggcgcacatcgcagggcgtgcgccagaatcgctgattctgtctctgtcatgggattactgcgaaagtttgttaatggaaaggaagccgccaaagt

SEQ ID NO: 91 - DNA, 26565 bp, Escherichia coli
  misc_feature (14853)..(14853): Unsure
ccagtcccggaatttgtgagagatagactttctccgtggtgaagggatagctctcacggaaaaagagacgcagaaacagcggatcaaacttaaatttcttctcatttgccgccagcagctgggcggttgtgtacatcgacataaaaaaatcccgtaaaaaagccgcacaggcggcctttagtgatgaagggtaaggttaaacgatgctgattgccgttccggcaaacgcggtccgttttttcgtctcgtcgctggcagcctccggccagagcacatcctcataacggaacgtgcctgacttgtagaacgtcagcgtggtgctggtctggtcagcatcaaccgccagaatgccaacggcagcaccgtcggtagtgccatcccacgcaaccagcttacgggtggaggtgtccagcatcagcggggtcattgcaggcgctttcgcactcaatccgccgggcgcggttgccgtatgtgccgggtcactgttgcccagcggctggtaatgggtaaaggtttctttgctcgtcataaacatcccttacactggtgtgttcagcaaatcgttaacggcatcagatgccgggttacctgcagccagcggagccggtgccccctgcatcagacgatccagcgcagtgtcactgcgcgcctgtgcactctgtggtgctgcggccagaatgcggcgggccgtttccacggtcataccgggggtttctgccagaacgcgcgcctgttcttcgcgtccgtgagcctcctcacagttgaggatccccataatgcggctgttttctgccgcaaccgctgcggtgatctgcgcgttcacgtccggttgcgccgcgctggcgttttcgccctccgtcgctggcaccacgtcagtaacgtcagcctgcgaagcagtggctgaaacagttgttgattgagtctctttggtcattcgccctcctgagagacgggatttacgtgcatccagtgcatcacgcataacggtgatcgcatcggtgctgttgacaagttcatcagccagtccggcatcaatggcctcctgaccgctgtacactgcagcctcggtatccagcacagcctgcacggacaggccggtatatgccgacaccttctgcgcaaacatctggcgggttgcatccatccgggactgcagtgtctcccggacgtcatccggaagatggctgtaggggttgccatccaccttatggctgccgctgtaaatcagcgtgatttccacgccctgtttctccagcgcagcaccgtaattactgtgagccatcatgacgccgatggagcctgtccgggcggtctgcgtgaccagacgccgggaggcggcgctggcaagcagctgccctgcactgcagttcatgtcattggccagcgcccataccggctttatgtcacgcacacgggcgatgatgtcagcgcagtcaaatgcccctgccaccattccgccgggcgtgtccatatcgagcagaatgccgtccaccatcgggtcgctggcagcctgttgcagacgggcgataatgccgttgtaaccggtcattcccgaatacggctgcagcgcccgcgtccggctgaccagcgtgccggacaccggcagcacggcgatgccgttcatgacctgataactgcgggtctgtcgtgggccgtcatcatcaccggataatgccagcgtcgcgagtgcctcctgggcagtcaggctgtcgccggacaccgcatccgtcaggcggctgatcccaagctggcctgcaagcgcacaaaagaaaacccgcgcataggcgggttcaagcatcagcggctcattaaaggccatgctggcaatatgcgggagattacgcagctctgctgtcactcttctcctcctctgttgattgtcgcagcccggattcaaatgctgcagccgcccaggcgggcggtttaagaccagctgcgcggcgctccatcgtttcacggacctgctgggcaaaaatttcctgatagtcgtcaccgcgtttcgcgcactctttctcgtaggtgctcagtccggcttctatcagcatcaccgcttcctgaacttctttcagaccatcgatggccatacgaccggagcctatccagtcgcagttcccccaggcactgcgggcttcctgaaaactgaagcgcgcttttgaaggtaacgtcaccacgcggcgaacgatggcctcttccagccagcacagaaacatctggctcgcctgacgggatgcgacgaattttcgccgccccataaagtgcgcccacgactcgttcgcgctggcccgtgccgtggagtagctcatctgggcgtaattccgggaaagctgctcatacgagacacccagtccggcagcgatataccgcagcagtgactgctcaaacacggagtagccgttatccgtgtcctgagccgtctgcaggttcagtgagtcacccggcatcaggtgcggcacttttgcgcctcccagacggaccggtgctgcggcgtaatacgcggcaatttcaccaatccagccggtcagcttgtcccgctgctccttactgttcgcgcccagaataaaatccatcgctgactgcgtatccagctcactctcaatggtggcggcatacatcgccttcacaatggcgctctgcagctgcgtgttctgcagcgtgtcgagcatcttcatctgctccatcacgctgtaaaacacatttgcaccgcgggtctgcccgtcctccacgggttcaaaaacgtgaatgaacgaggcgcgcccgccgggtaactcacggggtatccatgtccatttctgcggcatccagccaggatagccgtcctcgctgacgtaatatcccagcgccgcaccgctgtcattaatctgcacaccggcacggcagttccggctgtcgccggtattgttcgggttgctgatacgcttcggactgaccatccggaactgtgtccggaacagtcgcgacgggctggtatcccaggtggcctgaacgaacagttcaccgttaaaggcatgcatggccacaccttcccgaatcatcatggtgaacgtgcgttttcgctcaacgtcaatgcagcaacagtcgtcctcggcaaactctttccatgccgcttcaacctcgcgggaaaaggcacgggcttcttcctccccgatgcccagatagcgccagcttgggcgatgactgagccggaaaaaagacccgacgatatgatcctgatgcagctggatggcgttggcagcatagccgttattgcgtaccagatcgtccgcgcgggcattgccacgggtaaagttgggcagcagggctgcatccacactttcactcggtggattccacgcccgcaactgcccaccaaatccgctgccaccgccgtgataaccggcatattcacgcagtgatgtcatgccgtccggccccagaagggtgggaatggtgggcgttttcatacataaaatcctgcaggtcccctgcgtcgctgtgtcatgccggtctgcacttccagctccgcaatgtattttttcaggtcagacacggaagtggccgtaaactccacccttcgtccgtctttctgtactgttgccacccgttttcctgtcatcaggtcatgcagtgccgcacgggcagcggcaagttcttcctgtcgcgtcattcatcctctccggataaggcacgggcgtaatctgccagtgttttcttgttggttgctgcactatcctcttcctgcaggctcgccagcagcgcactgagatccagctgccagcgggaaatactgatacgcagcgccgccagcgcataaacgaagcagtcgagtgcttcattgcgtcgctttttgctgtcccacagtatttttttcctgccatccacccatttttcgacctgctcttcagcagtcagctgctgcgcttcggtcagatcaaaaatatccgggttattcgggaagtgaacggcaccgggaagcggttcatccccttccggcgtcagtgtgaagcggttataaatctgctctttcgcggtatccgtaccgatttcggtaaggtaaaccccgtttttgtttcgcttacgtggcatgctggccaccggctttccgtagacggatgcccctttaatggggatcacccggaacagcccatgttttttcgagcgttcatacacgatggtcgggtcaatcccgccaatatcccagcagatacgggataccgacatttctgcaccattccggcgggtataggttttattgatggcctcatccacacgcagcagcgtctgttcatcgtcgtggcggcccataataatctgccggtcaatcagccagctttcctcacccggcccccatccccatacgcgcatttcgtagcgatccagctgggagtcgataccggcggtcaggtaagccacacggtcaggaacgggcgctgaataatgctctttccgctctgccatcacttcagcatccggacgttcgccgattttcgcttcccacgtctcaccgagcgtggtgttcacgaaggttttacgttttcccgtatcccctttcgtcttcatccagtctttgacaatctgcacccaggtggtgaacgggctgtacgctgtccagatgtgaaaggtcacactgtcaggcggttcaatctcttcaccggatgacgaaaaccagagaatgccatcacgggtccagatcccggtcttttcgcagatataacgggcatcagtgaaatccagctcctgctggcggatgacgcaggcattatgctcgcagagataaaacacgctggcgggatcatccggcgtccatttgaggccaaacggcgtctctttgtcgccaaatttaagatactgctcctccccgcagtgcgggcaggcaacatgaaaacgcataaaatgcggggattcactggctgcacgctcaatctggcaggttcctctcactttgggcgtggagccacggatggactttggccagaccgagccttcaatacgcttgtcacccaggaacgtcggagagccttcctgttcaatatcatcatcaaaggcagcaagttcatcataacccgccacatccaccgacttttcacggtagttttttgccgctttaccgcccaggcaccagaaaccacgaccattggaaaaacgcttcatggtgagcgtgttatcccggtgctttttgccataccacggggccagcgccagcagcgacggaatatcacggatggtcggctcgacgtgggttttcataaagttttcggcatcaccatccgtcggcagccagataagggtgttacgctgcttatgctctatgaagtaggcataaacacccagcagcattttggaataaccgacacgggcagacttcaccacattcacctcacggatgtagtcgctgcccatcgcattcatgatggcccgctgaaagggcagtgtttcccagcgcccttcctggtatgcggattctttcgggagatagtaattggcatccgcccattcaacggcggtctgtggctccggcctgaacagggcacgaagcccggcgcggacaaaatgccgcagcctgtcaacctgactgttcgatatattcactcagcaaccccggtatcagttcatccagcgcggctgctttgttcatggctttgatgatatcccgtttcaggaaatcaatatgccggttatccagctcaggaaaacgtcgctgcaccgacagaggaataccgtcgagaatactggatatttcccttgctatacgcgacagcacgaaagtacagaatgcggtttccaccacttcagccgattctttggcatttttcagttcctgcgccgtcgcctgagcacgggtcaggcgatggcgctcaaattcaagtgttccggggtgaagatctgcctcgctggccagccgcagttcttcaacctcccggcgcagcttttcgttctcaatttcagcatccctttcggcataccattttatgacggcggcagaatcataaagcacctcattacccttgccaccgcctcgcagaacgggcattccctgctcctgccagttctgaatggtacggatactcgcaccgaaaatatcagccagctgctttttgttgacttccattgttcattccacggacaaaaacagagaaaggaaacgacagaggccaaaaagcccgttttcagcacctgtcgtttcctttcttttcagggggtgttttaaataaaaacattaggttacggcgaagaagaacggaaacgccttaaaccggaaaattttcataaatagtgaaaaaccgcgaggtcgccgccccgtaacctgtcggatcgccggaaaggacccgaaaaatgataataattatcatctacatatcacaacgtgcgtgtacgccatcaaaccacgtcaaataatcaattatgacgcaggtatcgtattaattgatccsgcatcaactttaacggtaaaaacaactttcagacaatacaaatcagcaacacagaatacgggacaacctcatgtcaacgaagaacagaacccgcagaacaacaacccgcaacatccgctttcctaaccaaatgattgaacaaattaacatcgctcttgatcaaaaagggtccgggaatttctcagcctgggtcattgaagcctgccgtcggagactaacgtcagaaaagagagcatatacatcaatcaaaagtgatgaagaatgaatatcccggtttctttacctcccctcccaccccgcacaggactggcgagcgtgtgggacaaatatgtgagtcataaacgccttatcctcagaaatgcagttggcatccgaacaggacgatattgtaaattcacctaattacgaggcattgcagtagttgaattgtagttctgtattagcctgacagtgacagaatgcgatattgactctgtcacaggtgaaatagtttgaatggttagcagttatggtgatcagtcaaccaccaaggaataatccttcgaattcttatcgtgcttcaccaacgctgcctcaattgccctgaatgcttccagagacacttgatgttctatacatgcaattacaacatccgggtaacccatcgaaatggtgctattaagcatagtttttacacgaacctgctcctgggagggggcatcagtgtattgatctttatgcattttgtcgctccatgcgtttgctcttcacttgcggctaaaaatataacgtcaaatcactcagcatgaaagagtgaaagtttcagcgcgtttcccttacataatctgtcatttgtattctcttcaggtataccggaaagactaggtattgtcacacaaccaataccatcgacaatcgagatttatatctattcggtaatgtttaaatataacaaaaccccgtaaaaacgaggtttatgggtaatttgtattgttgaatagcatctgatgagaaattgatgctaatactataaacatactagattaaatcaatcttgatatcatagctttcaagaccagtcattttttcccgtgcagtaaactggatactggtaacttctttcccggtctttttcttaagctcaatgattttttttgttatatattcagaaatatctgcttctgtttttgtttttaactcttcaatgttcatcatttcctcttttagtctgttatgactgtcctggtacacagtagtgtcaattatatggagcaaacgtataaaagataagatgaaacatcgcaataatcaacatacgacggtctaaatttcacacaaacagataaagatgattatcatttattatcaatgcattagaatcaaatcaattcaagagtctcattgctgcttccagaatttcttctgaagttacatgtcgatccgctgctacataaatgactttatgatctccggtcagagatggaaaccctgcagccattacagtgaggtgtgttgtttcgccatttggatattcacgcatgatggtgttaactccggtcatcactggcactaccattgctggttcagagttaaaaaaaactattatttttttcataatgttaccgtaatatgtgagtatccatcgactagacactaagcaaaaaagctcccgaaggagccttcattttcactttcttaaatctaacgacagatggctaacatttaagtattgtgaaatattatcaaatgtaatcatcattgatttacaaaagatacattttgccccgaaaggatttctgtcagaaacatcaaaagatgatgttctatactgagaaccatggcaacacgggcatctaaagtgaatatggtttgtaatattttctacctcaaagtgccactacatgaacagctgcagggcctttaggtccgttctcaataccaaattcgacttcctgattctcagttaacgttttgaaatcgttgctctgaatagctgagaaatgcacaaacacatctttgctaccatctttcggcgtgatgaaaccaaaacctttttcagggttaaaccatttcactaaaccagtcattttgttagacatcattattaccttttgaagaagttagcccttgggcagaatggtccgaaaaaaaatatcagagagaaaaaccaacaagaaaatctcaagaggtacaaataataaaattataacaatgactgcttcagataattttgtaacaaaccagaacaccattaacgcatgattaaccaaccatagcaaggattacttttgtaaagaaaaacacacgaatgaaacaatagctttatttattaataaaacgtgtcattctgtctaatgaccttttatcttacccttaagatttcaaggattttgactcatggaagagtcctttttatttaaatttcacattcaagcgctaaaaataatccgatttaatattaatctacatctgatattttttatctcttaaagattcataaatccgttgacaagtcactcctgcgatgtagcgtttgtcagcaatttcagcataaagctgagcttctgctgcaatatctccgagcatgttggtgagcattccttcggcggctttggttgttttgcctctgacggcagcggcaagatttgcggtatgctgcgctgcgtcaaggcgtatggcatattttgttgcttcggcacgcagctggttaacactatcagacagatcagcagccctggcagaaatttcagcggctttctgttgtgcatctttaacagcctcatcacgggatatacttcgcccctgttcaattattcgagcagcaaattggacatttacctcttgagataattcggcagcatcacgctccgcccattttttttgccatcctctgtcgctccagacattacctacgacaaatcctaccaacacgagcaaaatcaccgtgaatatctgattcactgttctatcccccagcaggttaatgcactctcctggtcacgacgaataacctgaccgtaacaattatttgaacgaatgcggcaatcacgtccaccgtcctttatccaccagcgaatcgcctcgcatgcgcctttacgatcaccggcattaagccgcttataaaacgtcgacggaaaacacttaccagggccaatgttatagggacagaatgacgcgataccggctttctgtggctcggtcagtggaacttttatattgcgctccacccatgccagcgccttatcccgctcaatggcgttaacctgggcgcatttttccttcgacagtttcattcccggaataacaggtttaccgtccaccatcgttgctccccgacagatggtccatatgccggagccatcgcggtatgcagtggtgtgattcccctctttttcatccagaaactgatcgagaatgtcaggggcaggagcactggcggcaatcagtgccagaacagcagccgacaggctgtatctgatttttacgttcatggatatttatcaggatttatcggcttcaaatccccggatatgttaaatcttacctcaccagtgatgggcactggcgggaggaggatgtcaatctgataaacacagaggtgactatggattacacaaatctaccaaaacaaacttttgctgatttaatcgcactcaggcaagcagtcgtagctctaatcaacttgttgccggagaaggaaaaggaattagttaaagcgcttcttaacagaactgccgccgatttttcatcatatccactgacagatgaccttgcggaccttcctgaattaattgcagcgtccgccattaagcttactgaagagatttaccctcctcaaaaatcttcacaaaattcctgcgagtaacttcaatgcaataatcgtaaaacgccgcaaactgctcatcgcggcgttttttttcatcttcagaagggatcagcaccgacaattttttattcagatcagcgacgctgccctccagtttttcaatgggcgattcaatatcatctttttctgaccgcaatgccgtcggtggcgtcttcagagaaccagtaattcttcccggtagctttcctttgtaggttatccacacattctgcgcctctaaaattatggggcgcttttccggcgactgctcatcccctacacataacccggcagcaacatccaggaatacctgtctgattctcattctggctgctgcctcataaaactccagcgcggcaccttcaacacggtccagcgagatgtccaggtcaaaaatttcaccgtcaaagcgttttttgtcccgtaaggctacagttaccgccactttattctcaaaattgcggactcctttcacaaccagttcatagtcttgtgtcattggattactctcttctcgcaaccttacgcctgtcttctttaatcttgaaataaaggtttgtcagatacgtcagcaggccaaaaaccagactacccagcacaccgattgcagcccactgtgacggagttactttatcgagtaactgcaatgcccagaaaccagcattaccagccgatgtgccataggcgatacctgttgttaacttatccattgatttcatatcctcaccccgatgtacacagatggtgcaatatgtttgaaaagatcggagtctatgggttagtttttatagcaaacgttgttctcaacggcgctaaaaaacagacacattaaaaatgtgggtaattattttaaaagaaaatcatatattaaataataatacgagatatgttttcatatttagtgtactgtatacggccatttatacaggaaaagcctatgtcagaacgtaaagactcaaaatcacgccgtaattatctcgttaaatgttcctgcccaaactgcacccaagagtcagaacacagtttttcaagagtacaaaaaggtgcccttttgatctgccctcattgcaacaaagtattccagacaaatcttaaagctgtagcttgattgattttattcgtaacaagtattttttatattttaataacatatttaaagcagataataaaaaacccgcctgagcgggtttaatattgtggtactttttgtgggagtcatccacttacgcactttgttttgctatgccagcagttagcttctgctgtaaaactattcatgcagcaaacctgcacttcaccacaatggttagcatacttttcctgattaagttattgccaaatatgctggccattgtttcatgtattggacctccttactatttattaaagagatccaatattcaccactctgtctgtatctccactcaggcatcagccttcttcgttatcgtatacagacaaactatgaattttaatcagtaattatgacatttgctgctgcaggacctttagcaccactctctacagagaaggtaaccttttgaccttcaaataaggttcgaaaattatcattctgaatcgcagaaaaatgcacaaacacatctttactaccatcaacaggagaaataaagccaaaacctttatcagcgttaaaccattttactaaaccagtcattttatttgacattctacattccttaacttgagcctttcggcataaatggcttgtataacagaaacgacttcgtacttaattggagagactcaaagaaggaataagtgaataacacctgaaatgagaactgctttagtaaactacttcgtatatcgtctgttcttcaaaccgacgcaatcattaacgcatagttgaacatatgaagcaatgtttattttagacatccagccatcttcaaccccatcaaaaaactatagctttcttcaggaacgtgtgtatagtgcgcccagttatcagtattaaggaatttttttgtcccgtaaaatgacaggaattgtcaaaacctttgacggcaaaagcggcaagggtcttatcaccccatccgatggtcgtatcgatgtccagcttcatgtttcagcgctcaatctccgcgatgcagaagaaattaccaccggattacgcgtggaattttgccggataaatggtctgcgtggcccttcagctgccaatgtttacctttcatgagctatattaaagctttaatttcaggccccatcgaatcaaacatggagagttttcatgaataaccccgtctgtcttgatgactggttgattggctttaaaagcttatgctgtactttgaccgtaatagctctgctaataatgtaatatgcagactcattgtatctagggacatagtactggaagaaaacattttaaacatcaggcaaagtcacccgataaataataagtaaacaaacatgaatcccggaatgagattcaacatctctattaccctatttaaagcacaaaaacccgctcatcagcgggttttctactttttcttaacgtcgggtatataaagcccatcgttgaaaaaattttatccatattttttgaaaaatgcaagcattacgtcgccatcttcggcgaaaatcatttatctcgtcacttttcttaattgcacctcagcatatgcttcttcctgccagcactttgtaaccagtttatcaatgacatctgcatatcctttgtaccactgataatcagtcaggtctggtaccagcttctggacatgacaccgcgccagtgtcgttggtaaacgactaaaccggtttccattgcaacgcccacaaatcttataaacaggcgcgccatgaagccgggtccttttttcatccaggacaatacctttacccttacaccctctgcacgctgtgctgacttctcccttaccatgacaatgctgacatagttccttcacccactcttccttgataacagactccccgcttctggagtatttcaccacttcgcgcaatacattatgaaatccagtaccagcacaaggctcacagcgagccttacttgccgcagacctggaataatcagcaaaggcaaaactcacaaggtaagggatgatctgtaaccggatttcttcactcaatttgttcaatgtcgggttatccagtgccatcgcgtaattgagcagaccttcaatcgcaaactgaggatcctgaacgccagcttttgccaggaataaggcaaacccaagcggtgctttcgactgcaccatcccctgcgcagccatcacatccgtaatcgttaaaccacctgagcctgtcgccggtgcggcatcactcaattttggagattttggggagtaatattttggtaaggcttcaaggttcatgctcgttctccacttacgccagtacgccaattgccagcgcacgatcgataaaacgaaatatcagctccagttgggagccatacttctcttcaaatgtcacggtatccgcatgcagctcgtcgtgatgctttctgcacaaaggcaacacaaagagatcatgcgcttttgtacccattccaccctgaccgtggcctatcaggtggtggggatcatcagctggctttccacaacatgcgcacggctgcgtcttaacccagcgcgtgtacttttcattaacccagcggcgacgtttggggcgtaacataaaagactccggcgactccggatccactttcagcgccagcacctttttcgctttatcctggatgatgctggtggcaggaaccgaaggcacaaggtcactttcccgggtgacagatggcacaacaggcttcggtaatctcagtgccttacgggctgcactttccggtaaggcatccgccaaatcattacgaaccagccaccagcacagttccggcattgtcacaacgtgactgtcatcaaaaccgagatcccgacgcacgacagacaacacccagcgggcacagttatccgttgccattgattccagccgttccgtgaactggtcacgcagctggttatcgcagtgccagcacagacgaattgctcccggagcgtgccgcattgtggtcatgttctcgctgtgccagtcggaatgaggccactgacagcccttttcacgaagtaaccagctttcaagacattccacgccaccagcacgacggatcactgcctcattgcggaacacggcccgaacggcaggatcatccgccagcggttgtgatgccgccggaacggcaccactggcgaaagatgaataacgttccggctcaggctccagcaggacacgcccctgcataaacaggggcatcagctctgaacctggcctgaacaatacaatccccatacgcggggcaatttcaggggtcagtagtgctctcacggtcacctcaatgaacggtatcgagcagctttaacagctcagggaatcgggattcgaagaaatgcggctgcgtctcgcgcggatttgcgggactggtgatgttcttgccgaacatgcaacctttcgctgtcagcgaccagaattttttgatgttgttaatcgcggtacggctgtatcgttcgcgctgctcgacgatccccagtttcaccatctggtgatatgcctgattanccgtcaggcggataccatactgtttcagcagtgcactcagtgacagtgtcgggcgacttgagccatcgtgtgcatcagcaggagcatcaatggcatagcgcggtgccagattcggtaagccaacagcctcctggagtttctgacaggcaccaagcactgatgagttagacaggtttaattcccggcgcataaagtccagcaggatcacgccagcctgcatcttgtcagcagcctgcccggataatttttccggtgtgctggttaccatatcgaaagtacggatcaccttcagatggaatgacgggctgatccacattgcataggcatacaccagttctttgcagacatacgtcccctggttatttccgccacgaataacgttaactggctctatattgaccgagttgcaaatctgcaactcgcttattaaacgttcagtttgctcattgcggagccagaatgcaggcttatgcttatccagagaaccggcagccctgtgcagatcgttcaggctgtaacgcccataagcatcacgacgaacttcaataccatcaataaccatcagattattcatacttcgtttctcctcttaatcaggcggctgcacccgccggtttctcatacttactgatagtgatctcgaccttcccttccgggataaccggtccccactccaccagcattcttttcacctgactgtcgtcttcccacacacccacgtgggtcagggcgtcaaacagcgccttgttatagttgtccagatcgcggatccggttatccggaggaaacaacacgatctccactgaagcaggtgccgacgttggtttcggcagacgacgtaactgctcaactattgctgcgcacgccgcgctctggaattttcgccccgccgcgcttatcaggctcttaccagcaaacgcccctttgttagggtgtcgccagtacgtgttcacgctgggcggaaaaggcaggatcagcttcatactttcaggcccctctcatgtaaccagtgggctgcacgcagcctggcgttttcctcaccggcaagcagtgcgcagataatcccgaccgcctcgctgtcgtcgtccttcacagcggtatgaagcgttatcccccgtgccacgccacgctttatcgtgatgacgccttttttctccagtgcgcgaagatgctccaccgctgcattcaccgaacggtatcccagcatggttgccacctcctgattggttggcgggaagccacgttctttctggtaagaaatcagcatatccagcacctgctgctggcattgagttaacgtcgtcattaagcccccacgtaattccctgacagataccactcttcacccgatacagcgcgcttgctgcttttccgtaaacaccgctcacgacgcgcaagaaaattgtttcgctcttgctgggagtggctttcacggaatgccgccatccacaccgttgcagcacgacggtataagcccctggactccagttcttccgcctggcgggtcaggcacaaaatcacccggggatcgttagtgccgacatagaaattgcgcacaggtctggattcacgaactggttgcggttccggctcctgcggtatctcagtcagccgcgggaaatgtctgcgtgtatccccttcacaacggtgagccacacgcccactctgacgtaacttgcttgctgactgcagaacgcgctgtcgtgagtaacctgcaaaagcatccgcaatgtctccggaagtacaccccggatgggcttcaatgaatttctgaacgtcattcaaaagactcatgatcaccccctgaatcctgccgggatctggctgtagtccacattgtcgtaactggctttgaagtacgggtcttcgcgtttttctgtgtacgtgctgacggacggcgataagcgcagggaaagctcatcccatttttcccgcagcttcgacgggctgagcacgttacggcaccagaacggatcgcggctgacgcggctgtacatctcgcagatttgtttgtgagtacgaccatcctgcacacacatcaggcgaatttcgtttgcccaggctgtccagttcggttctttgggacgaaccacctcgccgtcacattcggcagcctgctcgtacagggcgatgatttttttccagagccactgtgcgcaggtcaaatcatcctgcgtcccccactggcgttttttagggctgaatacaaccgcatcaggatggcgagttaaaaaatcctgttcagccgtctgcgtgtccggttgcgaagagtccggacgagaaggttttttatctgacggatcatgttttgattttactgacggatccccgccagattctgacgggtgaaaacccgcttttttgccagatttcgacgcatcaaattttgacgggtcagattttgatgcgtcagattttgacgggtcagaatctgacagttgagaaaatgccgctgcctgaagcttcgcaacgttaagctgataaacattcgacgcattgcggttaccctggcgacgcgccttacgcgttaaccagccttctgcttccagccgtgcgatagccgttctgacggtactcatccccgcgccaatctggcgtgcaatggtttcaatcgatggccagcacacaccttcgtcattactgaaatcagccaggcgggccataattgccacgctggataatttcatgcctgacgctgcgcaaccatcccatacatagccggttaatttagtgctcatgaccgacctctatttccctgaatttacgacgaaactgttcgagcgggctgaagcactcatgctcatagccttcgcggaggtagataacacgttgtgtttccggctcccaacgaatgactctgacgggcactccgtagtgatctttgaaccagcggttaacttgtcgcaaaggactgtctccttctgccggttgaaatcacccacagcccactctgcaaagctgtgggttacaatttccctgtcacctggtacatttactgcatagcaatactccaccttcgcttttccacccggtacaggaagcgcaatcagttgcgagcgacggtagtgtgttgttaaactgttcatgcgttagtttctccacagtcacgacacgccacggcgcccggagctgcacactcgcgggcgtcactactttctgaaacgcaaaagattttgtagaccagtgctgcatgctcctgcagcttcgaaattgagaggtacagctcatcgttaattgctgtcttctcatgcggttccactacaccgtcttcaattgctgaacgaatctgttttgaataactgccgatctgttcaatgacttccagcaggcgttggttgatatcggcgttgtccacatcctcgacgtcaggaagagacacaaagacgccatttgcagactgcgccactgcgtcagcaatgaagtgagttccaccagcacgttgcaaaatcattgcccatcccagcgggaaaatctgatcgccatcggcacgaaggcggttaaataatgcgttctctgttacatccagccagtcagctgcttcagcgtaaccacccggcaactttgcgatagtttttctgacagctttcacgtaccactcaggctgtttttctactttccagtgatgcttacccacggttagcctcatcgttctgtggtttctgttaatcgatttatccattagatttttcataaagctcaggtttaaatggcaaccgtccgcaagttctatatgcagcttctgctgcacgtccttttggaattaactggcccggacggtttcgccactgataaacggcttcagttgttatgccgaaaaaagcagcaactttctcaatactgccgaagtagctttcgatatcgtcagttgtcatacgccctccaaactaagttttgttagatgctaattacaaatctatctttggtcaataaaaactaagattacttagcaattaaagaaatggtgctcctatggaaacggttggtcagcgtataaaagctctgagaagagttaccagaacgtcccagaaagaattgggtaaattttgtggagtaagcgacgttgctgtggggtactgggagaaagacatcaatacccctggcggggaggcactttcgaaattagcgaagttcttcaatacgtcaatagattacattctttatggtgctgagtttgaaggcaaactcgtcacaaacatgcgcagagttcctgtaatatcgtgggttcaggctgggcagtttactgagtgcagggcagcagaagtgtttagtgaagtggacaagtgggtagatacatcattaaaggttggtgataactcatttgcattagaggttaaaggtgactccatgactaaccctaatggcctcccaacaataccagaaggcgcaacagtgattgtagatccagatgcagaacctcgtcatggaaaaatagtcatcgctcgacttgatggaacaaacgaagctacagtaaaaaaattagtcatcgatggccctcaaaagtttttagtgccattaaatcctcggtatcccaacatccctatcaatggtaattgccttatcattggtgtagtcaaaggagttcaatacgaactctaagatctctcttctctaactaaggcaccgaactaagaaaagtttggtgttttctcttgccatgataactaagttaagttagattttatatcaaagataacgaacaggcaggacgcccacgaagtagccgcctggggcatatgaagtccaggatgattcgttagcaacaaaaaagcgccctataggacgcttcgctctttaacaatctggatgacttattactcagatttgaactttggttctggcaaaagaggaggagttgagtcctcgaatcgtagccagtgctcccagatatcgtgggattgtaattccagaagaccaatttgacgtgatgcaactgcagtgccagctatagttcctcctacataatcaacctggacggactttgacgctttctcaattaattctgtccaagcttcactttccgcgttaaaagaagcagttaattcctgcagacgctgtggatcatccttgttgtcttgtttcaaacgattcagggcggccaccgaatacttattcttaacccaactaacctgagctaactgaactctctgacaagcgtccatatcagtagttgtttcctgaggcatatcaaagcaggaaataaaaaaagtctcaacaccatcatttagactactgctcggctggttcaaagcatcagaagcattggatgctatcggtattatcagtgctaccgacagaatcaaacgtttaacataaatcgctcccatttaattatcccctctaagaacagagtcatccagattagccgaatccttgttgttggggaataaccaggcccacctcgcctgatgtggctaaaagcaggcacataacagctaagtattttcaaccagagagaatccttagcgttgtggtgaatgcggctcagcgcacgcgggttaaggttgaggctgacagtcgaccttctgtggatacccacccgcctggtgtgcaaccttcgccaggcaccgggaggccccggcaccacaactttatgctgtgtgtagtcctggcggtaccagcttgtacccttgcttccggctggtaccgctctttttacaaaacagagaagagcatcaccggacgacgggctcataacccaatccacccgggcggctgccaccgcaggtgttcttctctgttttgtggagaaaccaaccgaccttgcagggtcgatatgatgaggagcagcaaaatggctagcgaacgcagtaccaacgtgcaggaatttatcggggagctggacggcggcgtatttgaaaccaaaatcggcgcagttctcagtgaagtcgcttccggtgtgatgaacacgaaaaccaaaggtaaggtctcgctcaacctggaaatcgaaccgtttgatgagaaccgtgtgaaaataaaacacaaactctcatatgttcgtccgactaaccgcgggaaaatttccgaagaagacaccaccgaaacgccgatgtatgtcaatcgcggtggtcgcctgactattctgcaggaagaccagggacaattactgactcttgccggtgaacctgacggaaaactccgcgcagcaggtcattaatatcgttcttaattaactgattatttatctcatcactgaatatctttatatagtgaggacttattatgtctcagaacttagacgcaaccgcaattaatcaaatccatgcccttatttctgctcagggtgttaatgaaattatcagtaagattggtgccgacgcagtggcattacctgaaaatttccgcattcatgatctggaaaaatttaatttaaatcgcttccgtttccgtggtgcgctttccactgccagcatcgatgactttacccgttattctaaagatcttgcggatgaaggcacccgctgctttatcgatgccgataatatgcgtgccgtcagtgtgcttaacctgggtactattgatgagcctggtcacgcagataacaccgccactctcaaactgaaaaagacagcaccgttctctgctctgttgtctgttaacggcgagcgtaactcccagaagtcactggcagaatggattgaagactgggccgactaccttgtgggctttgatgctaatggtgatgccattcaggcaacaaaagcggctgcggcagtccgtaaaatcacgattgaagcaaaccagaccgctgattttgaagacaatgacttcagcggcaaacgctccctgatggagtctgtcgaagcgaagaccaaagatattatgccagtggcatttgaatttaaatgcgttccgtttgaaggcctgaaagaacgtccgtttaaattacgcctcagcattatcactggcgatcgtcctgtactggttctgcgcattattcagctggaagcagtgcaggaagaaatggctaacgaatttcgtgatctgcttgttgagaaattcaaggacagcaaagtagaaacctttattggtacttttaccgcctgatttcattactgcaaatgcccctgcgggggcatttatggaaacgtaattgactcaataatcgccggatggtgagggctttcttttaccagaattcagcgcggtgcagcgcatatacgtggagaacaaaatgtcatttattaaaactttttccgggaagcatttttattatgacaggataaataaagacgacatcgttattaacgatatcgcggtttctctttcaaatatctgtcgctttgcaggacatctttcacatttctacagcgtcgcccaacatgcggtgctttgcagccaactggtaccgcaggaatttgcttttgaagcgttaatgcatgatgcaacagaagcgcattgccaggacatcccggcgccactgaaacgccttcttcctgactataaacggatggaagaaaaaatagacgccgtaatccgtgagaaatacgggttacccccggttatgagtacgcccgtgaaatatgccgatctcatcatgctggcaaccgaacgccgcgatctcgggcttgatgatggctctttctggcccgtactggaaggtatcccggcaacagagatgttcaaagttattccactgtcgccaggccatacctatgggatgtttatggaacgctttaaagagttaactgagtcgtaaaaatcagcacgtacgaattcaaactctgccataaaagaacatataagtaatttattaacatatagatataggttatattacaaattgaaaaattattggagagcaacaatgaatcaaaatccattctcattctatgactttcttggatatttaataccaggtggtttttttatcctattaatgtatttctgtggtttgacattcgatctagatattgttattgacttaagtgaattgctcagaggtcaaagtcaaatctttggcattttgaactacgcttcaatagttattatatcttatatagctggacattttatttctatcacatcagcattttttatcgaaaaatacatgaataaagaattaggatatccttccaaatatctatttaaaaaattgatagatacctcagaaagcatttgtagcccatcatgcgatgagagaagcgctgataaaaaaacaaaaataaagaatcgcataatcaaatgcgtattatgtccaataatactatgggattttataacacaaaaactatgttattctcaatctctaccatttcatttagctaatacaacatggttaatgatcaaagaaggttatgagaaaaagttcataacaaatcgccaattattacaagataaaaacggacttgatgatgatctcttcagattggcatatcattatgtttatgagttttcaaaacaacatcaaacaaaaattcaaaactatgttgcattatatggtttttgcagaaacatatgtttaatctttataatttcattttgggtatcagttccaacctttatttatcgattatgtactcatagtgattatctttatagtttactttcaataatgcttagctttttcttcgtctatgttttctatgttggttttgttaaattttatagaagatatactttagaagtattaatggcatttgctgtacttcaaagtaacgacactattcgttaataatgttgctcccgtgtgcagacgggataatggagaaacgtatgctgaacctcgattgtgttcctatctcaacttattgcaaagaaactggcgaaactcctgaagcaataaacaaacgtgtacagcgcggtgtttggcgtgaaggtgttcaggttttaaaggttgaaggcgttaaggagaggtggattgatcttagtgaggttgcaaaatgggccagacaaaactgctcaaactaccgcgcggcgtaacaatcaggaaacaccaccagggagaaacgatcaatataactttcacctacaaaggagttagatgtcgtgagccgctttccaatctggaagtaacaccaaagaacattaaatacgccgagcgtacactcggcgaaatccataataagatcgaaaggggaacattcatttatgcagaatattttccccgttctgctcgtttgaaaatttttggtaatgctgctgcaagcaaaacggtaaagatgtacctagacgaatatcttgaaatctgcgaaacaagaaaactttcaccctctacgattggtggctataaaaaatgccgtagtgcgttagcctcacttcacatttgccctgcaagtgaattaacaccagcaaccctgaaagcgtggattcaaagccagaaaacaaccttaaaaaccattcgcaaccagttatctttcctacggtcagcacttgatgaagccgtgaccgatggggtacttcaaattaaccccgtatcgttagtaacagcttcgcgctaccaaagtgataagtcagaagcagaaagcagctatgtggttgatccgctatcaccagcagaagttgatgcattactagcagcagccggaaacaaacaatgggaaaatctgttccggttcgccatacatacaggcctgcgtagttctgaattatgtgccctacgatggcatgatatcgactttgttggaaaaacagcccatgttcagagcgcaagtgttgtcggagttatcaaaggaacaaagacaaaagccggtacccgtaaagttgaactgactgaagaagcaatgttggcgttgataaaccagaagccatttacattcatgaaggatgctactgtctttgaagatccaaagaccaataaaccctggacaagtgctgatgcaatcaggaaaaaagcatgggtgccaacattgcgaaaagcaggtattcgttacagaaatccatatcaaactaggcatacattcgccacccgccatatcagccggggagcaaacctgttttggcttgcagctcaaatggggcataaagggccggaaatgttatttcgtcattatggttcatatttaaaggaatatgacggtaatacgaccagcaatatcacaaaaaaagccacttaagtggctttatcaattaggaggctctcgatttaagcatttccgtacacttagcaaagagcctctcagttgttagaatcgcaacttcagactgtttagaagtgaccgattgatcaagtcgatagtctgcaacaatcctctgagctttaagttgactcaggataaaactaatcccttttagatatctagcttcatatacttcacttcctcttgaagcatcaccctgcaaataattgattagcccctgatgactgtctttcggcccgtttaccatacaaggcaagacatgatggtaagcgccatagtaggatcttgctatagcatttcgatagccgatttcgtcattacgttgatgacagtcttttgcaaaaccgagaaaatcttgactattaaccggcatgtgcaaccctccgggtaatcagacctaattcggagatagcattctgctcaatatgagtgtctttacattcaaaccaaacagtaaaatctttaccgactaaacaatcgtgctcagccattgaaaaagcaagctcaatattcatatcagcgatttgttcagcatcagaagactttgtcatgaatacaatcgcattcactttctcttccgaaatattataaaaacgcattcccgaaagatgaaccttctgagaatccatgacattggctacattattgaaaataagttcatattctaaaccagaaagatcggcacgttgcttaaaggattcgacctgggaaacaacttcatcaaaattgttgtccattttttcaggctccttatctccgaacaatttagagtatgactggaaatacttctccgccaacgccattttccccataaagagggagttttcataagcttgaagataaataaacggggatacgaagctttcagcaagcttaatgcttgtttcaaagcttttcttcaacgtaccgtaatctgacaagaaaacaagaaaattctttgcaacaaccttattatggcatacctgcaaggaacgctcaaagaagcctatcgcctcattcacttgaccatgtgcaccatagaccaacgctaaaagatagtcctcagagacaggatctctaagtgcttcaatctcacgtaacatccttctaaagttaaagtcatcaatcctcactccatctttgaggtatttagttagccccgcgctaataactgatgctttttttgctggctgcaacattaaaaaccttatcttacaaatagttggtaatgatgttgaattattttttgttctttatggctaataagattacatgaagggacaacttctggccaccttagaaaacactcactttagtaacaagagtcaataatattgttgacaaatcacaaaaaaacaaacttatccaaaacaatctggtttattacaaagcctctgtgcataaatctgtgtataacatcatttttacacacatttttataaaaatattttttagcaaaaaatgctatctatctccgaaactgcaaccacaaaccattaattccaaatgaaactattttaaaataaatagtaagacagtaacaggacggaaaaagttccgcaaaagagccgcgtgtaaaatcaacaatatttggctatttaaattcaatgaattacataactatggacacgggttcaactcccgccagctccaccaa

SEQ ID NO: 92 - DNA, 321 bp, Escherichia coli
gtcctgacccgccctgaatagaattcatccaattacagtccagacatatacagtatccctcagctcagtatcagcttctcgacaaatggtcactgttatttacccgttgccagaaagagaataatttgcccccatagccagccttcctggaatctgtatattcattaatattgttatcgattccatcaagtaacataggttggatgcgattgatcttactcacattagtcgacacggaactcagtaagttgaactctgaaaaagcagtttaaatagcatttaaacaaatgccaccagttcgaaaaagagtataagcacact

SEQ ID NO: 93 - DNA, 1942 bp, Escherichia coli
agcttaaggctttacgtaattgttgtgctacctgtcgcgccataccttcgttaacaatattagtaaacgaaagcagtaatccaccttccccacttgaacggatacgccagtcgctaagtgcctgcaccgcaaggcctgcagcattggctttacgcgcatgggcaatatcatcgcctatcattctgatcaccatctggataccacctttctgcggcacaacctgaaatccttgctgcgtcaacgcttgctcaatccattgccgacgttgagcataatgctgacgcattttcttcagatgccgccagaaatgcccctcgcgaagaaagtctgccagtgtgttctgccatagaacaggtaccgcacatggagccagtgacgcctggtggcggaattgtgcaatttgcttcaccggcaccaccagccacgcacagcgcaatgcaggaaatagcgctttgctgaatgttccggcataaattacccgctgcggtgcgtcgagactttttaacgccggtaacggcttaccgtgatagcgaaactcactgtcataatcatcttcaataatccatgcctgactacgatctgcccattccagtatctgatgcctgcgcgctaaagagagcgccacacccagcggactttggtgtgctggtgttatcagggcaaaacgcgcatcaggataattttgtattccgcttgtgatatccagtccattgtcatcaaccggcacaggcaaaatttccacatcatggcgagtgacaatcgggcgaatcagtggaaagccgggatcttctatccacatcccgtttcccggtttcgccagcgcgtgcagaattaaagctattgaggccgcataaccgtgagtgataaagacctgctctggctgacaatcaatcccacgtgaaatgcgtaagtaatcaactattgcctcgcgcaacgccacctcaccgcaaacatcgcctaacgccaaatcaaagcgcgtctgggtacgaaggcgacgccccatcacccgcagcccacagctctcgcggaaagagatcgagtgcgggtaatcccatttgaaatggcaacggttgctgactttcaccggcaaaatctacaacttgtacagtagattgttgcggatatatccgctcactgacaaatgtgccagcctgtccccagcctgatcagccatccttgcgccaccagctcagcatacgcattttcgacagtggatcgagacacccccaggctcctgcgaccaggtacgacttgaaggcaggccttgctgccgggtttcagttccccttgctcaatagccgtttttaactgacgggcgatatcctgatagcgcggcatatggtctgcttttttaggtaatttatggctctctttagcagtccattatagtgctacattgcgggcgttaataagaggagaaactgtatgactacattacgtcagccttactacgaacttagcccggcagtgtataacgcactagtgcaggccaaaacggcactggaaaatagcacgctggataccacgttgatggagttagtttatttgcgcgtctcgcaaatcaacggctgcgcattttgtctggagatgcacagcaaagcattgcgcaaatccggcgtgccacagcacaaactggacgccctggcaggttggcgcgtaagccatcattttgatgaacgcgagcgggcggcgctggcatgggcggaatcggtaaccgaaattgccagaacccatgcggaagacgaggtttatcagcctttgcttgagcatttcagcgcagcagagatcagcgacttaacgtttgccatcgggctgatgaattgttttaaccgtctggccgtttcatgcggatgtaacttcttgatgccgggtatttgccggcaaaaaacacaaaatcccctaccccgttgagccattcatcggtggcgtaatcaatctaaaa

SEQ ID NO: 94 - DNA, 2106 bp, Escherichia coli
gttgccaaagggagctgcggctccctttttatttgctcattctgcaaacggttgttttatacactcattcggtgtatcttttcgccgccccaaactcttccattcaccattaaccggttctgagcattcgctcaggttgttaattctctttttccttcgcccttgctttcgcgggtgatactcacatttttattttaaccccataactcgcaccctcgcgggcgtacatttattacacacaaaataatggattattatgaatacccaacgaaaatacgggagaacctggcattaccccttctctccaggcaccaccagcgatgaccgcattaacaccgattactggcaggatttacaggccatcacgcaattggtgcacacagaaaaactcgatggcgaaaataactgccttaaccgctacggcgtgtttgcccgctcccatgccacgcctacgcagtcggcatggacctataaaattcgccaacgctggcaactgctgaaaaacgatctcggcgacctggagttgtttggtgaaaatctctacgccgttcattccattgaataccgcgcgctggaacaggacttttacctgtttgccgttcgctgtggctgagctgggaagaggtgcagttttacgccgctctgtttgatttcccctgcgttcccgaaatctccggcccgcagccggggaatgatgaaaaaagctggcaacgtgattttctggcgctgaccaatgcgcgcggcacattcgatccctgggatacgcaaacctgtcaaccctgtacgctggaaggcattgtcagccgaaatcatgatgcgttttctgtcgctgacttttcgcataacgtcttcaagtatgtgcgcaaaaatcatgtcaaaaccactgtgcactggaaacgccactggcaacgggcgcggatggcccatgagttcgtttatggagaacagtcatgatttggcaacttaccgacgataaacgctggtcggcgctacgtcagcgttttagctgggttgaggagatgcatcacacgccacaagaccctgagcatcatggtgaaggcgacgtcggcgtacataccgaaatggtgcttaacgccctcattactctgccagaattccagcaactccccgctcaacagcaggaagttttatgggcggcagcgttattgcatgatgttgaaaagcgcagcactaccgtgcaggaaaacggacgtattcagtctcctggtcatgctcgtcggggcgaactgacggcccgacaaattttatggcgcgatatcccaacgccgttcgtgctgcgcgagcaaattgttgcactggtgcgtctgcatgggttaccgctatggttactggagcgcccggaaccggagcgtttgttgctcacggctgcaatgcgcatcgacacgcgtctgctcgctttgcttgctcgtgccgatctgcttggtcgccaaagcccggatcagcaatcaatgctggaacgcatcgatctgttcgagctgttttgccatgagcaacaatgctggggaaaaatgcgcccgttcgtttctgattccgcacgctggcattacctgacccatgagcaaagttctcctgattttgttccctgggaggctgaaccttttgaggtcattttgctgtgtggcttaccgggtatgggcaaagatcgctatatcaatgaacagtgccagggaatggacgttatcagccttgatgatatgcggcggcgaatcaatgccagtccggacgacaaaaccgccaccgggcgtattgtgcaacaggcaaaagaagaggcacgcgtttttttacgccagaaaaagccgttcatctggaatgcaacgaacattacccgccagctgagtagccaactcatcaacctgtttacggcttacggcgcacgagtaaaaatcgtttatcttgaagtgccatgggcgcaatggaagcagcaaaatgccagacgcgagtatgcagttcctgaagcggtcgtgatgcggatggcctcaaggctggaagttcctcaacctgatgaagcacatagcgtggagtatcgggtgattgaaaggtaaaaaaaccgggcggtggtgtcacctgcccggcttcttttgttcc

SEQ ID NO: 95 - DNA, 100 bp, Escherichia coli
gcagctgacgcgtcttatccgacctacagggaacacatgtgttgatcacataatacgtttatgtcgcatcctgcactgtcccaaaatgtcggatgcgaca

SEQ ID NO: 96 - DNA, 2422 bp, Escherichia coli
ttgccagtccacatctgggtacttttttccgacaagtcgttctggtggtataaaaaagtaattgccagtaacggggaggatttaagggaagcaaccgtgccggatacggcgtgaacaatgaccactttgtcagctatccatatgattgtattttgaggttcatcgcagattagcgatgaacctttattaaataatacaattccgactgaaataacaggtaaggatacaaaatgggttcatggggaatggaggctctcgaaagcgacgaagggctggatttgattaattgggtagaggaacaactgcaagatgattcgacctttgatgccgagtcaattgttcaacgcttaagccagcatgaagatttgttcggatttcagggagatgaagaatttctctacgataataatgttatcggtctcgtcgaacttatcattcaaaaagcagccggggaaaaaatcacatcgagtaaacaaattgatcaactcgacagttatcggctcacgtcgattttcagcaaaaaactccagggccgtttacaaacaatcgacgacacacatgagtggataatgctttttgaggggcgagcacgcgaaaaggcaaaagcatatctgattgagattactgataaattaagagtagtaaagacaacagcctgaatgacaaacaagggcgcgcaaaattaagaatctgcgccctttcaaagcccgacaggcgtagcgcatcaggcgatttagcgtctgccatcagtcaaagaaaccattccggcttaacgccaaatcgggctgaaagtgccttaatgtggggtatcgtcaaggatcgttgtccagacaagatctggctgaccagggatttagagccgatttcgttcttcaaatctgcataggtcagattatgttgatcaatcagcgtgcgaagtaacgccacaccaacaggcattgccgcaacggctttgtcgaactctgcaaacttttcgttgttgttttcatattctgcaatgcggctcgccagaaagtcgataagtggattggtgtcatcttcttcaatcaaatattcgaccagttccagtgcttcacgataatcatcttctgagtcactgcctcccagaaaggggactgcattgaccagttctcttgttgctttaacagcgcgtgcagcattagcagtcattctttgttctctctgtagtaacgtgtcagtttgtcatactctgcgtgattcgtgatgtgcttcacaaagaaccgcttattaacaaagtttatgtaggcaataaccctaagattgttcccgccgacatccagaacgtaccatttgttgcgatatttaaaattgtcgaggttgggaaaagccgttcgcatttcttctggcgtagaaaaatccgtttccttaataacccgatacaatgagtgtagagccagagcgtcgttaggatatttgcgcgcacactcttcaaatggcgctttagaaatgatgtgcatttttaagttttaacttccttatagtaagtaaacagccacatctgcgagttctatccttatatgttcggaacactatagcttatcaaatccaagttcacaatatgtaaacacttgcgcacgatataattactacaaaaatcctcatagccactctgcaaaaagtcagttctgattcaccccatcaagcacatcaccctttattaaacaacgctgtgtcagcgccagatctttcgtttgcgggttacgtccggcgacaggtttaatgacgagtttacggttggaggtataggtaaaacgcgtgagtgcggggtagcttaacttgccaaaccagccgtgaacgcgctgccatttggcctcttttacctgatacaaactggttatccagtaaccggaatcaaactgcatatccagcaattgcgtgtgaccattgccttgtaaatcaagcaaatcatcaacgccagtttcgtttgcggtgtaaaaaccatcgacctggaaaacacacgggcgaccttgctgattaaaggtcatcaggatcaaaaacgaggaaggcgccagcccgtttcccgaaacacctcgccagataaccaaatcctgaatgccattacgatcgaggtcagcacggtaaaattgcgcattacccgccatattttgcagcacacccacaggcacaaaccaggatttaccggcacggtccttagcggttaatcgccagtaatcctcttcatttggcatcttctcaagcgttacgcctgcaatgcccacttttctaaaatgccaggtttgctcggcatcataaggcagggttaagagaggtttcagcgcccgcttttgcgcgtattcgctgtcactcatcggtagatattcggtaaagctggtagcctgcgcaggcagcactaagctcaataaaaaagcgcacatccctgtcctgatgttcaattccctga

SEQ ID NO: 97 - DNA, 513 bp, Escherichia coli
agatgtggttatactcgatcaacattcaatgaaaggaggcagtatggcagtttcagcaagaaatcaattaaccggaacagttagcgcagtagcaatgggcgctgtgaatgatgaagtagaactgacgctggcaggtggtgcaaagctggtggcaattgtgactcacagcagccagcaagcgctgggtctggcgaaagggaaagaagcgattgccctgattaaagccccgtgggtcacgctggcaacggaagactgtggactgaaattctctgctcgcaaccagtttgctggcagcgtgtcgacaatcaccgaaggcgcagtgaacgccactgtccatatcaaaacggatgcgggttttgaaattgtggcagtggtaacaaatgaaagtcaggatgaaatgaaactcaccactggctcgcgcgttattgcattgatcaaagcatcagccatcctgattgccaccaaagcgtaagcgccgtatttgccggagagtatggctctccggcagattta

SEQ ID NO: 98 - DNA, 2108 bp, Escherichia coli
  misc_feature (1140)..(1140): Unsure
ctcgtcatctaataatccagataagatatgatgtatcgtttaagtgcctgataagggtgtaatgtatgccaatattaacctcgggtaatatctcgctaccgaggttaattttcactttgcaatataattacagtctcttgcaagttgattttatcttagtaataagaaccgaccaatcttattgccatttcgatattagcaggcatagatgcgtcgtagccatacatatggccatatttcggacgtaatacttcagttactttcttaataattgcttcgcgctgggctcgcgcaaaatcagcatgattatttgccgttttattcataaatttaccaaaactttcttcttttctgactttaattgtcgtatcccgaagatcattaagaaactggcgttgaaatttaaaatcatcgtgtgaaccaatattaccatgcccgccaataaaatatttccagtcaagcatttcaacctgacgcaaattactgtcatggtaaaccaacgtatccgatacggcgaagcccatcatcggcagttggtcaggattcaggagatccgggctgtgagctactttttcctgttttagcaaccatacagaatggtcgtcggtatgtcctgctttaacaaatcggtgtaattcaatggtctgcttttcaaatttaaactggtcatcttttttacttaaaacctgagtggcgacgggtaagcgactgttcataaattgcattttttcagcagtggctttactggcaataatacgcagattcacgccttctttcttcgcctcatcgttccaaaatggactatcgccaatgtgatccacatggtaatgagaataaaccagcgctgttacgggtaatggagtcacatcacgaattgcctgtaataaatatttaccgcgaccctccggagcatcaaacagcaaaacccctttgtctccgacataaaacgtagtggaataaaaatagcgttgaacataataagttctctcgccaattttttgtaaaatataaggctgagacatatttctttcaaaaaggttattgagtttatcgcttggcgatattattttttccgctgaaggttcaacataacttgcattaactgtagactgaatttgcagtcgaaatttccgtttgagncaaaaatactaccagatataagagaagaggctagaattgtatatattttaatgccttgcatacgtagtcctttattaatgtgttgttgatttatagcatctctgaacagactgttattttagatattactacgttacgagattcatttttcttcgaatattatgtttatctcattcaaaaaatatgttcatcatttgatggtttaaataatatctgcaaggcataatactccacatctttaaaacctgcctcaaaaaatcattcattagtaaaaaggatatttatatgcaaaacatagctgtggtttattattcaggatatggtcacactaaactggttgctgaaaaagtggcacaaggcgcccatgcagatttaatttcgattgataacgaaggaaatatcactgagcaggagtgggaaaaactggacgcagccgatgccattatcttcggtgctcccacctatatgggcggtgcgccatggcaattcaagaaatttgctgatgccagttccaaagcgtggtttacacgtaaatggcaggataaagtcttcgggggtttcaccaacagcgccagcctgaatggcgataaacaagttacgctgatctatctgcaaacgctggcttcacagcatggcggtctgtgggtgagtttaggtcaggctcctgccaatgtgcttgcgtcaaccagggaagatgtaaacaatctgggcggttcagtcggtttgctggtgcaatctccagccgatgcgggtgcagaccaaatccctacgggcgatctggatacagccgtgaaatatggtgaacgcgtggcgacaattactgtgcgcttaaaatgatgattgccaaatgtgacgctgacgcgtctatccggtcttctacatctaaaaagtgccgtcccctggtcagtcagataaagttttaacgctgtacccgataacagttcaacatgtaccatgtaccaaaagaa

SEQ ID NO: 99 - DNA, 263 bp, Escherichia coli
tgattactcccttgcctgcaggaaatcaatgccaccagaaacagagtataaaaaagggtgcaggagaccaaaccatcacaattcagtacgcggggttttaccccgcgtggtggctacttcttcgattcgtaagcgagaactgccttaaactccataccacgttctctgatactcaactcacacaacgagtcgcctaccatcaacgtgaatcccagtactgtacaacacagtacgatgattgccacaagggcatattttgtcag

SEQ ID NO: 100 - DNA, 2670 bp, Escherichia coli
tattcaaacctatgatgaacaggttaatgcctcctggtcagaagtattaaatcaatatcaacgtcgcaccgatcttattcctaatcttgtcgctagtattaaaggttactccagccatgaacaagaggtactagaagccgtaacattggcacgtagtcaggctaatcgcgccagtagcgatcttcagaaaactccgggagatgaacaaaaattacaagcctggcaacaggcgcaggcgcaggtgactcgcactctcgggcagttaacgattattagtgagcgttaccctcagttaaaggctcaagagctctatcaaaacttaatggtacagctcgaaggaagtgaaaatagaattgccgttgcgcgaggaagatatattaaagccattgaacaatataatgtcactatccgcaaattccccgctgtattaaccgcaaaggtcatggattacacaccaaagaaaaattatttgccggatgatgtcaccgcagtaagtaaagccccaacaatagattttagccagaatgctaatgctcattaagcggggacgttctatgcgaaattttatcttccttatagctttcttctgttcatctgtgtttgctacacaaattccagtacctgaatcacccaggtatgtgaatgacttaaccggcacattaacaaacagcgaagtaaacaccctgaccaaccagattaaagccctgacgcaaaaaaaacacgcacagttggtcgtgttagtggttgatacaacaggcgatgaaaccatcgagcagtacgcaacgcgggtattcgatagctggaaaccgggtgataaagaccgtgatgatggcgttctactgttagtcgcctggcaggatcataccgtgcgtattgaaatcggttacgggctggaaggtattattacggatgcacagtccgggaaaattattcgcaacagtattattccggcatttaaaaaaggcgacctggctggtggtttacaaaaggggatcaacgatattgaaagtcgcctgacggggaataattcagcaacgataacaccgaccgatcaccctttgccctttagcggttggtgggctttattagtctgggcgataatactgacgtttatttctgccagaggatatatcaaaacgttgggagtaatttgcttcgcagccattgtactggcctttgttttacctatagcaggtttcagcggaagctggggagtactcacaacattactctgcttcgccacaccgtttctggcagttgccatcgcttttacccccttcggcaaaaaggttcgggattcgatgcgtgatgccaaccagccatcacgccatacaagaagcaattcttcctcccactattcatcatcgtcatcctcttcattcgacaatgacaattttagcggtggtggcggttcatctggtggcggtggcgcttccgggcgctggtaacaaaaggaattgatatgcgtatttttctcttacttctgatgctatgcggttttcaggtattcgctgaacgattgccttcagtgactgacttaaccgggacattaacgacagaagaacaaagtgctttaaatcaacaattacagactctcgagcagcaaaaccacttccaggtggccgtgttggttacgccgacaacagggggcaaaaacattaaacttgcagcctcgcagagatacggggtatatcactggaaacccgttggagagaagcgatatggcgaaggtatcttaattctcgtcgtttggccggaagggctggcgtcaatgaagattggacatggactggaacagatgttgccgccggaacaagctgcgcaaattgttcgttaccatatgcagccagaattcgaaaaaaacaatctctttgctggattaacgggcggaattgaaagcatcgcacagtttacccatatcaaagcgaaccttagccctttggatgctttagccaatcatctgtttgctaatccgcaactttcgctgccatgccttgcctggacagtgctgatgatcgttgccatcattgtcctctggcgatttaccagccgtccaggacctggcatatggatgatatcaatgattacacctacggtctggtttttctgctttcaggacgatgtcatcattcggcgggtgtcggtcgtttgttttagtttatttttcgcagcaatctgctggcagcgtctcgcagtagtttttaatatgtgccgcgtatttcctatgatgctggccccaaaaaataaaaacgctaaagtgaaaaaacaaaagaagactccgcaatttcgtgaatcaggacgaaattcattgtttgtcgtgatgctgataattattgtgggatggtgcctggtgttcgccagtaataaagatattgcattcatctcaacaattattgggttaattgatcattttatcggcccaataaccattgctggcatcgttctgctgatcattgtggccaaatttactggcaatcttaagctggggtcaggagaaaaaagcaacaggaaaacggggaatcgtaatgctcatgctcattctcgctcttcgtcgagaaattctttccgcggtggtggcggttcttcaggaggcggcggttcatccggccgttggtgatcgtaatgcgcttaatctttattctattcactttgtggtgccttcctgggctt

SEQ ID NO: 101 - DNA, 59 bp, Escherichia coli
taccttcgagtaaaagatatcgctggatacggctgacgccatatccagctatgtaagat

SEQ ID NO: 102 - DNA, 32687 bp, Escherichia coli
tattagaatgctgacaaaccgcaaagctgctattggcttgcggttttttcgtttttacgcttccttacccgtttcagtgaagcctgagacaatgagtaaaccgttaatatccctccatcaaagccatccatcttatttatatattaaacatataccccattaatgaatttcatttatatattctataaatcaatttattttggttatgttaacatttcaatatcacaacagggcgcaacgcttatataatcattgtacaaaaagcacacaactttttaattagtagaaaaattaataattttttgtgaaagcccggacaataagtttaatgaatatcttaataggctctcatactacccaatttcttaaaagtgcaaatttgtgaagcttatcctgttattattttaagtttcatgccaaattctctcaccagataatgccgccctcttccgaaaaataatcaagaggccaaacaatatctaaaatgatacaactgtatctattcccctgaaaaatacattattcatttgtatattttcctcatcattgctttttatttaaatcatccgataatcccctgaatataattatgtcaataaccatcagaaaaagtggatgatgaggaaaaggatatggccgacagtttccagaatgaagttcccgccgctcgtgtaaatatcaagcttgatctgcatacaggcaatgctaaaaagaaagttgaactccccctcaagcttcttgccgtaggcgattacagtaacggaaaagagcaacgtccgctgtccgaacgggacaaggttgatatcaataaaaacaacttcaacagcgtcatggctgagttttcgcctgcggttaatttaacagtagaagatacgctaaacggaaacggtaatgaacaaaatatcgcgcttgaatttaaaagcctgaaggattttgaacccgaacaggtagcaaaaaatattccgcaacttcgtgtattactcgctatgcgcaatttactacgtgacctgaaatccaatctgctggataacgcaacgtttcgccgtgaactggaaaatatcctgaaagacccgacgctcagttcagaactgcgtgatgaactggcgaaaattgcgccgcaggagaacgtttaacccgaacgcgtattcaggttaaaccggagaagaaaggatcactgaaaaggaaatgctgatgtctgtacaacaagaacatgccacctctgaaactgcaacactcaccaccactgagtccggcggcgtttatcagtccctgttcgataaaattaatttaaccccggtgtcttccattcaggaaatcgatttatggcaaaacagcgaaacgctggccgatgcctcacccgatgagcgcgtgacggcggcgattcacgttctgctttcctgtctggcgaaatcaggcgaggacgtggttaagctcgacaagagcctgctggattttcatatcgacgatctggatcagaaaatcagtaaacagcttgatgcggtcatgcaccaccctgaattccagaaagtcgagtcgctgtggcgtggtacatggttcgtcgtacagcgcactgattttcgcaaaaatgtcagaattgaattgctggatatcagcaaagagcatctgcgtcaggattttgatgattcaccggaaatcattcagagtggtttatatcgccatacatacattcaggagtacgatacgccgggtggcgaacctgtagcctcattaatatccagctatgaatttgataacagcccgcaggatattgccctgctgcgtaatatttccagagtgtctgccgcttcccatatgccttttatcggttctgtcggaccgaaattcttccttaaaaattcgatggaagaagtcgccgcgattaaagatatcggcaactactttgaccgcgcagaatatattaaatggaagtcgttccgcgatacggatgacagccgctatgtgggattagtgatgccgcgcgtgctgggccgtctgccctatgggccggacacggtgccggtacgcagctttaactatgtggaagaagtcaaaggcccggatcacgaaaaatacctgtggacaaacgcctcgttcgcctttgccgccaatatggtgaagagctttgtgaataatggctggtgcgtgcagatccgtggcccacaggcgggcggcgcagtggccgatctgccgatccatctttacgatctcggcaccggcaatcaggtcaaaattccgtccgaagtgatgatcccggaaacccgcgagtttgagttcgccaaccttggctttattccactctcttattacaaaaaccgcgattacgcctgctttttctcggcaaactccgcccagaaaccggcgctgtatgataccgctgacgccaccgccaacagccgtatcaacgcccgtttgccctatatcttcctgctgtcccgcattgctcactacctgaaaattattcagcgcgagaatatcggcaccaccaaagaccgccgcgtgctggaactggagcttaacacctggatccgcacgctggtgacggaaatgaccgatccgggcgatgaacttcaggcttcgcatccactgcgcgacgggaaagttatcgtcgaggacatagaggacaatccgggctttttccgcgtcagactctttgccgtgccgcatttccagatcgaagggatggacgtcaacctttctctggtttcccagatgccaaaagcaaaagcctgatcgggcggtggtgtgatgtatgaaaatttgtcgaccactgtgggctgaggggacattcctgtcttctcagcagtttcagcagcaggcccgctgggaagcgttcagcaatgacagcattgcgcagctttgtattcgccatccgtgggggatcgcaaacgtgctctttgaccgggatgccctggcgctcggaaagctgaaaacgcaggcagtacgcctgcgttttgctgatggtacgctgatcgattcagacgtgagtgacgttctgccgctcgcctgcgatctgcgcgcgctgaagaacgacagcgcgattgtcctgctggcgctgccgcttgcacatggtaacggcggtaatctcggtcagggtgagcagactgaaagaccgctgcgctatcgtcaggaatggcaaaaggtgcaggatatctacggcagtgacagtgaagatatggccgttgagcgtcatgcgctgtccctgcgctttgctcatgataacaatcaggattacatcacctgcccactggcgcgtctggtgcgggatgttcagggcaactggacacaggatgagagctatattccgccgttactggcgtttaacgcccatgacgggctggtacagcgtctggacacgctgctgttgcagctacgggccaaatgtcagcgcctgatggcgatgcgccgggaaagcaaccagcgtatggcggacttcgccgtcgccgatgtctccctgttctggctgcttaacgcgctgaactccgccgagccggtactgagtgatttcctgcgctacccggcggttcatcccgaactggtctggcgggagctggcgaggcttgccggtgcgctgctgacgttttcccttgaacataacgtcagcgccgttccgccctatgtccacgaatcgccgtccatcgtctttccgccacttttctccctgctcagcgaactgctggaagccagcctgccgtcacgggtgatcgcgctggatctggcgtccctgccgggcaaccgctggaaagcagacctgcacgatccgcgcctgcgggaagaggccgacttttacctgtccgttcgttcctctctgcctgcgcatcaggtactgcaccagctaccgctggtctgcaaaatcggtgcgcctgatgacgtcacgctgcttatcaatgtggcgctgaatggtgttccactggtgccgcttacctcagttccggcagcgctgccactgcggctggagaaccagtattttgcgctggatatgcacagtgacgcggctaaatcgatgctggagtccgggtgctgcatgatttatgcgccgggaacaatgggcgacctgaaacctgaactgtttgcggtgctgcgcacatgaaaaaagagacggatatcaatatcgacgcgctgctgcgcgacacgtttctgacggtggtggaactgcgtcagggaaccaccgtgcgtcacggtatggagctgtatcgccactgccagcggcaggtggaactggtccgcgaacgtctgaaagatgccggattcagtcgggagaacgtggagcacataacttacgcgcagtgcgccctgctggacgaaacggtcctgagccgtagcggcatggacgacggtcagaccatttggatgaaggatccactccagtcgcatttcttcaacaccctgcaggccggtgagctgctgtacgagcggatgaagcaggtgctacaggaacccgcccccgcgcaggccgtgctgacctgctttcaccgtgtcctgctgctgggatttcgcgggcgttatcaggatccggcagccccggagcgcgaccagcttatttcgacgctcaacgggcaggtcgcgccatttggtgtgctgccggaaacggcggtactgaacgtgccgttatccacccgtcagcaccctttgctgcattcgccatttttctggctggtaacactggcgctgctactggcgggcgtctggtgggggctacaccactggctgaatgtactggtggatgaactgctgccgcaaagcctgcgttaaagggagtcgtgagtgaggaacacgctgaaacaggccatcgtgctgtggggaatggtgttactgctggtgctgtggtcagtgtttatcagtccgtctggcgtgctgagatgggccggtgcggcggctatcgttctggcggttgccgcgttgttgatttatcggcgcaggcaggcgtggacggagatgaccggcgatgccgggttgtcatcgctgccgccggaaacctaccgacagccggtagtgctggtctgtggcggtctgtcggcgcacctgtccactgacagcccggtccgccaggtttcagaagggctgtatctgcatgttcctgatgaagaacagcttgtggcgcaggtggagcgattgctgacccttcgcccggcgtgggcatcgcagcttgccgtggcgtataccatcatgcccggcatacaccgggatgtggcggttctggccggacggctgcgacggttcgcccacagtatggcgacggtgcgtcgtcgggcaggcgtaaacgtcccctggcttctctggagcgggctgtccggctcgccgttgccggaaagagcgagttcaccgtggtttatctgtaccggcggcgaagttcaggtagcaacatccacagagaccaccatgcccgcgcagtggattgcacaatccggcgtacaggagcgcagtcagcgactctgttacctgctgaaagctgaaagcctgatgcagtggctgaatcttaatgtgctgacggcactgaacggcccggaggcgaaatgtccaccactggcgatgaccgtggggctggtcccctcgttgcctgcggtggataacaacctgtggcagttgtggatcaccgccagaaccggcctgacgccggatatcgcggacaccggcacagacgatgcgctgccattcccggatgccctgttacggcagttgccgcgtcagtcgggctttaccccgctgcgacgagcctgcgtgaccatgctgggcgtcaccaccgtggcgggtatcgccgcgctgtgcctgtcagccacggcaaatcgccagttattacggcaggtcggtgacgatctgcaccggttttatgccgtcccggtggaggaatttatcaccaaagcccgtcacctgtcggtgctgaaagacgatgcgaccatgctcgatgggtattaccgggaaggagaacccctgcgcctcggtctggggttataccccggcgaacgcatccgccagccggtattacgcgccattcgcgactggcgtccgcctgaacaaaaaatggaggtgacggcttcgcttcaggttcagaccgtgcgtcttgacagtatgtcgctgtttgacgtcggacaggcccgcctgaaagacggctcgacaaaagtgctggtggacgcactggtgaacatccgggcaaaaccgggctggctgatcctcgtggccggatataccgatgccaccggcgatgaaaaaagcaatcagcagttatcgctgcggcgtgccgaagcggtgcgcaactggatgctgcagaccagcgacatcccggccacctgttttgccgtacagggactgggcgagagccagcctgcggcgaccaacgacacgccacagggccgggcagtcaaccggcgtgtcgaaatcagtcttgttccgcgttctgacgcctgtcaggacgtgaaataaaacataccgccggaagaaggcggtgcttcaatcacactaacaaggagagtaattctcatggctattcctgcttatctctggctgaaagatgacggcggcgcggatatcaaaggttccgtggacgttcaggggcgcgaaggtagcatcgaagtggtggcgctggatcacgatgtgtacatcccgaccgacaataacaccggcaaactgaccggtacccgtactcacaagccttttacgtttaccaaagaaatcgatgcgtccagcccgtatctctacaaagctgtgaccaccggacagaccctgaaaacggcagaatttaagttttaccgcatcaacgatgccggtcaggaagtggagtacttcaacatcacgcttgataacgtcaagctggtcagagtcgctccgcttatgcacgacatcaaggatccttccagagagaagcataaccacctggaacgtattgagttccgctacgagaaaatcacctggacttacaaagacggcaacatcattcattccgactcgtggaatgagcgtccttccgcctgataactgcggcagacaggaaactgtctgcctttttgttgtgtgctttgtccagtgccgcaggcaccggtactgagcaaagcatacccacaatctggtgatacctgatgggcctgagtgaggtaacggctatgggcggtagcgtgcctgaacgcggatcgcaggaatacagaacacgataaggaaacccttctatgacaggaaatcaccccgccgcgctgctgcgtcgccttaacccatactgtgcacgggcgctggacgctgccgcctcactgtgtcagacccgcgcccatgcggaaataaccattgaacactggctgctgaaactgctggagcagggagaaggcgatatcacggtgattgcccgccgctatgaatgggatatcgacacgctctggcagtctctgctggcacatctggacaccttaccccgcccggtccgcgaacgtcctcaactttctgaaccgctggcagcgcttatccgacaggcgtggctgatagcgtcactggaaggcgacgatccacaaatccgcagccagcatctgctgatggcgctgacagaaaaaccgatgctgcccgcctgtaatgacctgtgggtattgctgagtctgagccgcgtgcagcttgagcggctgcgtcccctgctggatgcgcagtcggatgaatgtccggcacgtcagccacaggtcaccgaaccgctgacctctgcactgccggagacggcaacggcggacgcaccggcaaaaacgctgacggagaaacaggatgacgccctgctggcggtgcttaaccgctttaccgaagacgtgacggaaaaagcccgcagcgggcgaatcgacccggtattcgggcgcgacacggaaattcgccagatggtcgatatcctctcccgtcgccgcaaaaacaacccgattctggtgggagaaccgggggtgggcaaaaccgcgctggtggaagggctggcgctgcgtatcaccgaaggcaacgtgccggacagcctgaaaacggtgcatatccgcacactggacctcggtctgttacaggctggcgcgggcgttaaaggtgaatttgaacagcggctgaaaaatgtcatcgatgcagtgcagaaatcaccggagccggtactgctgtttattgatgaagcccataccattatcggtgcgggtaatcaggcaggcggcgcggatgcggcgaacctgctgaaaccggcactggcaaggggcgaactgcgcaccatcgcggcgaccacgtggagcgaatacaaacagtattttgagcgcgacgccgcgctggagcgccgcttccagatggttaaggttgacgagccggatgatgacaccgcctgcctgatgctcagggggctgaaagcccgctatgcgcagcaccacggcgtacatatgctggacagcgccattcagaccgccgtgcgcctgtcgcgccgctatctgaccggacgccagttgccggacaaggcggttgatttgctggataccgccggggcaagagtccgcatgagccttgacaccctgccggaaccgttgacgcagcttcatgtgcgactggcggcactggatattgagcgggaagcgattgagcaggacagcgtattttatcccgaagccagcccggagcggctggcggaactgaccgatttgcgtgatgagctacaggcagaagccgggcatctggaagcgcagtatcagcaggaaaaggcactggcgcagcagattatgacgttgcgtcaggaagggacagacagcactgaactgcaacagcaactgcgaacgcatcagggctttgcaccgctgctggcgctggatgtggacgcccgcgccgtcgccacggtggtggcggactggaccggcatcccgctatcttccctgctcaaggacgagcagagcgacctgctcagtatggaacagagtcttgaaaaccgcgttgtcgggcaaagcccggcgctctgcgccatcgcacagcggctgcgggcggctaagaccggcctcacgccggagaacggcccgcagggggtattcctgctgaccggccccagcggcaccggtaaaaccgaaactgcgctcacactggccgacactctgtttggcggtgaaaaatcccttatcaccatcaacctctccgaatatcaggagccgcataccgtctcccagcttaaggggtctcctccgggctacgttggctacggtcagggtggcgtactcaccgaagccgttcgcaaacgcccttacagcgtggtgctgctcgacgaagtggaaaaggcgcaccgcgacgtaatgaacctgttctatcaggtatttgaccggggctttatgcgcgacggcgaaggccgggaaattgacttccgcaacaccgtgattctgatgacggctaatctgggcagcgaccacatcatgcaactgctggaggaaaaaccggacgccacggacgcagacctgcatgaactgctgtatcccctgctgcgcgagcacttccagccagcactgatggcgcgttttcagacggtgatttaccgcccgctgggacaggaggcgatgcgcgccattgtggaaatgaaactggcgcaggtggcccgccgtcttcaccagcactatgggctggaaacggaaatcagtaacagcctgtacgacgccctgaccgccgcctgcctgctgccggacaccggtgcgcgtaatatcgacagcctgctgaaccagcaaatcctgccggtcttaagccagcagttgctggcgcagcaggccgtgcatcataagcctgcccgactgcggcttgactgggatgatgaagacgggattgtgctggaatttgatgagaaataatggaggctcttatgaacgtacagttcttcgaccacgcacaccacaagctcaaaattcgcggcctgcaaagtccggtggatgtgctgacctttgaaggccgcgagcaactgagtaccccgttccgctacgacattcagtttaccagcagcgataaagccatcgcgccggagtcggtgctgatgcaggatggcgcattcagcctgacggcaccgccggtacagggaatgccggtacagactgccctgcgcaccctgcacggcgtcattaccggctttaaacatctctcatcgtcacaggacgaagcccgttacgaagtgcgccttgaaccccgtatggcgctgcttacccgcagccgccagaacgccatctaccagaaccagacggtgccgcaaatcgtcgaaaaaatcctgcgcgagcggcaccagatgcgcggtcaggacttcgtgtttaacctcaaaagcgaatacccggcccgcgaacaggtgatgcagtacggtgaggacgacctgacgtttgtttcacgcctgctgtcagaggtgggtatctggttccgctttgccaccgacgcccggttgaaaatcgaagttatcgaattttacgacgaccagagcggctacgagcgcgggctgacgctgccgcttcgccatccttctgggctgtttgatggtgaaacggaagccgtatgggggctgaacaccgcgtacagcgtggtggaaaaaagtgtctccacgcgggactacaactaccgtgaagccacggcggaaatgaccacaggccagcatgacgccaccgggggcgataacaccacttacggcgaagcctaccactatgccgacaacttcctgcaacaaggcgataaagaggcagcggaaagcggcgcgttttatgcccgtatccgtcacgaacgctacctgaatgaacaggccattctcaaaggccagagcaccagttcactgctgatgccggggctggagataaaagttcagggcgacgacgcgcctgcggtgttccgcaagggcgtgctgattaccggcgtgacgaccagcgcggcgcgtgaccgcagctatgagctgacgttcacggcgataccgtactcagaacgctacggctaccgtccggcgctaatcccccgcccggtcatggccggaacgctcccggcgcgggtcaccagcacggtgaagaacgatatctatgcccatatcgacaaggacgggcgctaccgagtcaaccttgactttgaccgcgatacgtggaaaccgggttatgaaagcctgtgggtacgccagtcgcgcccgtatgcgggagacacctacggcctgcacctgccgctgctggcgggaacggaggtcagcatcgcctttgaggaaggcaacccggacaggccgtatatcgccggggtaaaacacgactcggcgcacaccgaccatgtgaccattcagaactacaagcgcaacgtgctgcgtaccccggccaacaacaaaatccggctggatgacgagcgcgggaaggagcatatcaaggtcagtaccgaatatggcggcaagagccagctaaacctcggccatcttgttgatgccgggaaagaacagcgtggcgaaggctttgaactgcgtaccgatctgtggggcgcggtgcgggcgaagaaagggatttttatcagcgctgatgcgcaggataaggcgcagggtcaggtgctggagatgcagccagctctggctcgcctttctgcagcgttggtgacaatggaatctctggctgccagtgcgcaacaggctcaggcactggcggcagatgtgagtcgtcagcagacgctgttgcagcaaaaaattgagcagttacagcaggaagtgctactgggtagcgcacctaagggcgtggcgcttgtcagcggtgaggatatgcagttgtctgccagcgataatctgactctgacagcaggtaagcaactggatattggcgtacagaaagactttacgctggcagcaggaaaacagctcagcttgtatagccgtgcgggagcaaagctctttagctcacataacgatattgatattcaggcgcaggggggaaatctgaccacctggtcaacacaggacacctatatatcgagtggtaaaaagctggtggtgacagcgcaggatgagttaacactgatttgtggcgggggctatatcaaaattaaaagtggcaatgtggagattggcggtccgggaaaactattggttaaaaatgccggtattaagaaagcaggctccggtagtatgcagggcgtgatgaagtcgtttgagcctgaaagtttcgatgaaaatttcattatttcgaatccagcatcaggtaagccgatagcaaatcaaaaatatgaaatacacatgccagatgggagtgttattgccgggataaccgatgcaatggggtattcctctcttgttgcgtcaaaagcatctgatgacctaaaaattattctgaaaaaatgatttcagggggaaatatgttgaaagaatggatgatatttacgtgcagtttattgactctggctggggcgtcactgcccctcagtggctgtatttccagaggccaggagtctatatccgaaggggcggcatttggggcagggatcctgcgcgaaccgggagcaacaaaaaaagccgacacgaaagacctcaatgtgccaccaccggtttatggtccgccgcaggtgatatttcgcattgatgacaaccgctatttcacgctagaaaattatacccactgcgagaacgggcagacgttttataataataaagcaaaaaacattcatgttaaaatattagacgcttcagggtatttatttaaaggccgcttattctggttatcaacgcgtgatgattttctggcctttcctgccacgttaaataccagacacgcttcctgtatggggtcgaataaaggctgtatgaatgcggtcattgtcactaccgatggtggaaaaagacgcagtggtgtgccatacggcagttatacccagaatccgaccggtgccacgagggattatgacatgctggtgatgaatgacggcttctacctgcttagatatcgggggggacagggcagatttagtccggtgatacttagatggattctcagtactgaagatagctctggtgttgtgcgttcagaagatgcttatgaattgttccgtcccggagaagaggtaccctccaccggtttttataaaatcgacctgtcacgtttttatcccaaaaacaacgttatggaaatgcagtgtgacaggacgctggagccagttcaaccttcagagagtaaaattcaatgagtaccaataaatcagagccaacccgaaaggtcgatgttcatcttacggataatggtactccttttgcctattcaatgacctctcataaaaatgtcaaagtccgtgcggaagttcaaccaccgctccagttacccggcttaattatttttgttcacggcgttaattctgaaggcgaatggtacgattatgctgagaggtcgttatgcgccggactcaatcagcgcctggggcttgaaggtgagcatggtcttaaggaaaacaactatgaaggaggtttctttgtcaacagcgataaaagtgagggtggttgggaacatacctacgaaatagagggttcccaaaagaaatgggtttcaggccccagaaaaataacaaaaggtggtgacggtcgttccccggttattcgtttttactggggctatcgtgcggcggataatgaaaccgatacatacgccattccgctaaaaaataaaaagggggacaactattatgaccttcccccggaatcgcgtaaagccaaaggcccttggttttggggcggcggtccgttccagaatggctgcaaccaactggtcagcctgtggagtaaaaccgggtttaataacaatccatccctgctgggggttccgcttccgttcagtactcaggtactgaacggcgaacgtgacaggctactaagcgacgccccaccaagacactattacgctcatgcggctggtcgtctggccaaattaattaaaaccattcgcaaccagcatccggaagacaccgttacggtgctgtcacacagtcaaggaacaatgattgcgctggcggcggcagccatcgaagcgccggatgcgctgtttgtgatgaactccccctatgcgctggagaatgaacctaccacctatatttcctacccgataaaggaaattatcagccgtaaggccagatcggcgacgtttgccgatattgtcaaaaaggtagcggaaaacaaaacgcggctgaagcaacagggctgcgacaatctgctggcaggcatgagcagcgacggtaattcatggatcccggaaggtaaaacacataacggactaccggagcgggacaaccatggaacgacgtggatttattgtaatccccatgaccgagttatggggtcttcccccctgcgcagtattggctggcaggggctgccggatactaaagatggcacaccacataccttatttaaacaggctggagatacgctttatgttcgtatacttgggcgcaatacaccctgcggcggtacgccgaccgcacagacccatttcagtaatttgggtgatggcaaacccttctgggacagcacaacaacgctgttacagagggcaacgtggccggatccggacagcgggcagacattaactattaacgcgccgcaggtgccggaaccgctgacagctgaagaactaaagaattttgatcaagactatgcccgtgacgaaaagcaaagcggcggagcaggatatgcttacgggcagattaacccagagacgaaaaaacctgtcgataccgactatcgttattacatttcactgtatggctattttgaccggaagatggtgccgaaaaaagactcgggatactaccagtcagggccggggtcgaaagaggacagggtaaagtatgaaaagcagtcacaagaagagatgctggaggaggtaagaacctatgttcagcgtccaacagatcacagtaccctgccatcggatgagcgatttatgagccgggtggtggcctatgatttacccatcggttactgctggcattcgtgggacaaagcgggtctggaagagcttcgtcgtcaggctgactggctggaaagcgatgactattactttagtggcaagctgactgttccgccaataccgcctgcgataaaacaggatgtcgccgaagatgctgaacagagaaaggcagaagaaaaggcccggttacgtaatgtgtgaaacaaatacatggaaagtgatatgggaaaaaatgtggtagtactcaatgacgcaacttctcacggtggcaaagtctcttcggcctcttcaacctttgatattcagggaaaaaaggctgcactgctgaatgataccgtcacttgcccgaagcatggtactaacccaattgtggagtgtgataccagttatgaggagggtggacgtgggattgttgtgcatggctgtaaaagcgcctgcggctcggtggtgtatgccagtctgccggatgtggagataggctgatggggtggtcaaaaccgaaaattcccaccagcaaagacgtgcagcgctggtctccttgggtatgcctttttattctgtttgccggggcatttgtcgcgctcacatatgggatactgcattcccctgcggacggactccccgccctcgccagcggttactggttgcccttgacaggcaggatgatggctggagtgatgacagccctaaccggctatttgttgtggtgggagtttcaggcatattacgtctggtgctggaatagtcggcggcacagcgcactccttgtctggcagcagcgagcacatcagcaccgctacttagcctgccatgttctgctgacctcagacacgcaactgcttcctcgcctcgcaggtacttcttatgaagataataataatgatcctcctttaacattattggcagaggagccgctgatacccggtattgcgcgttttgagcaactttgccagttactgataaaccagattaaagcttctcttattcagcattatccttccggtcagatgactgtactgattgaaacctctgcatcggataaagagcgtgagcgaacaacccttattcgtttatggaaagaggatgaattaccctggatactggacatccatatgtcacccactccccttcctctcagtgatgagaataaccacttatttgatattgataaccctgttcttgttttggcgttgcactaccgccagccggaggaaaacctgccggaattcgccagcgcattgttactgttgccgcccgagttactgaaagtttctatacggcgggatacggtgcgggtgtttcgcccgatgccactaaacattgatgcgatctcccgtgagttgactgaactgcgggatatggcgcaacagccagtgaatgccagatatctggtctggcacagtggtctgacacaggcatcacaacaggctctgggccgtgtggtgaacgaccttccgttatccctgcataacgatatcgccactggcggaattattgatgtggataaagttatcgccgcttacgggcctcctgccggttggctgatggtggcaaccgccgcagagatggtcagatacgggccgggaagtcactggttgttacaggtcagaaataaacaggccagtgctgtggtgacgggcaacggctatccggcgattaatcaggaataccttgatacaacctcatctccttatcccgcaggttccctaatgctggcggttatgctcaatatactggtgctctggtttatcgggcggtacagccaggaatggctgttttcctgggcaggcgtagccatgacactgttgctgatgatagtgacattgccaggcatcgtctttggtttacgaagcgctgttgctcatctgcaataccctcgctttatacaggctatcgttcgcgcccagaaggaataatttgttatgaaaagagttgtgcgtcttttgggtgtggggttactgctccttgttgtgttgttgctcattttgtttgttctggctcagaccacaccgctgatatcagcacaggatgagcatgctgtctggcttcgtctgttgataacagcgattgtgatctgtttgctaagtatgtgcatatttttcctcttttctttccggcagaacgaagcctcgacgatatcactatacgctcaaccgactgatataaaggaaataaatacggagcagccgaactatgcatcactgctgacgatatatttacgcgaccgctacggtccgttctggcggcgtaaagtccgcctgctgctggtgaccggcgagcctgaacaggcagaagccatcgcgccggggctgaccgggcaacactggctggaaggcgaccacacggtgctgatatatggcggcaggccaacagcggagcctgatgtcacactgctgaccgccttaaaaaaactgcgccgcagccgtccgctggacggcatcatctgggcgctgacagaagaacagagccgccagacagcgcaactcgacaaaggctggcgcggactgataaacggcggtaagcgactcggttttcaggctccactctatttgtggcaggtctgtgacgacggtgattatcagaccggacgccccctgcaaagcgtcggctgcctgctgccggaacgctgtaccccggaacaactggctgtaatgctggaagcacawaccctgccgctgacggaacagggcatgtcgcagctactgaccgataaccgccatgattttctgctgcgtctggctcatacccttgcagagcggggtattgctcactggcagaccgtcctgaaaccgctgctggcaggcggcgcattttcttccctgcgcctgcgcggcctgatgttcagcccgccgcttgccgccgtgccggaggccgcacctcatgcagtggctgccgtcaccggtctgggcgggcgtgacgggtgataacgcgcgcgggcgcacggtgggttttcctgtggctgcgtaccgcactgatgtccgctgtctgcgtgctggtgatatggggggccggaatgacgacctcgttcttcgccaaccgcgctcttgttcaggaaaccggtatccagacggcacgtgcgcttgatacccgcctgccgctggcagaacaactggtggcgctgcataccctgcagggcgaactggaacgcctgcaatatcgtatccgcgaaggtgcgccgtggtatcagcgttttggccttgaacgtaaccaacaactgctcgccgccgcttttcccggctatgcgcaggcggcaaaccggctggtgcgcgacgtggccgttgaccatctgcaacagcaactgaacgcctttgtcgccctgccgcccaacagtcctcagcgtaccgccaccggtgaacaacgctataagcagcttaaggcattgctgatgacttcccgcccggaaaaggccgacgctgcctttttcagtaccacgctgatggcggacggtctgcgctacgagaatatcccggaaggtgtgcggcagagcgtgttgccgtcactgctgaccttctggacggcgaacctgccggaacacccgcagtggaaaacatcgccgccaccggaactgaccggcgcagtgcgtaaaatcctgctgcgccagattggtgtgcgtaatgccgaaaacaccctctaccagaacgtgctgcaacaggtgtcccgcaactacgccgatatgacgctggcggacatgaccggggataccctcaccgaatctcttttcagtacggaacagacggtgccggggatgttcacccgtcaggcgtgggaaggacaggtcagggaagccatcgagcaggtggtgacggcgcggcgcgaggaaatcgactgggtactcagcgaccgccagcaggatacctctgcggatatctcgccggatacgctgcgtaaccgtctcacctcacgctactttaccgactttgccggaagctggctggcgtttctcaacagcattcactggaaaaaggaagactcgctctccggcattctcgaccagctgacactgatggccgatgcccgtcagtcgccactgattgcgctgacggacaccctcgcgtggcaggcggcgacaggcagggaaaaccgtggtctgtcagactcgctggcgaaatcggcacaggaactgtttaacggcaaggagaaaacgccgcagcaatcccgtgaaggtgacgacgtgcctgtcgggccgctggataaaaccttcacgccgctgctgcgtttgctgggcgataaggccggaggcggcgacagccagctgagtctacagacctacctcacccgcgtcacccgcgtgcgcctcaaactgcaacaggtgaccaacgcccccgacccgcaggagatgacccaacaactggcgcagacggtcttacagggtaaaaccgttgacctcaccgacacccgcgactacggacggttaatcgccgccagtctgggcgaagaatggagtggcttcggtcaggcgctgttcgttcgcccggtagagcagtcgtggcggcaggtgctgacgcctgcggcggacagcctgaaccgccagtggcagcgggcgattgtcagccactggaatcaggacttcgctggccgctatccgttcaaagcctcacagaacgatgcctccctccccctgctggcgcagtacctgcgcgatgacgggcgcatcaacctgtttatcgccgccaacctttccggcgtgctgaaacgagagggccgctactgggtggctgacgccatgaacacgcaggggctgacggtcaatccggactttatccgcgccctgaaccgcctgcgcgacgtggccgataccgcctttgccagcggcgatgccgggatacattttgaactgcgggcaaaaccggcgcgtgacgtgatgaagacgcatctggtgattgacgggcaggagctggaatatttcaaccagaaagaacgctggcagcgttttaactggccggatgaacagtggcaacccggcgcatcgctaagctggaccagcacacaggcgatggagcgcatactggcggattaccggggaagctggagtcttattcgcctgctggaacaggcgcaggtgacgccggtggacagcagcacctttaaggtggtgtggaaagcgcaggacggcctgccgctgaattacctgctacgggttgaacagggtaaagggccgctggcgctgctggagctgaaaaacttccgcctgccgggacaggtgtttctgaccggaaaaagtatgaaggatgtggaagagtatggggaagacgccgatgagtgaactgttgcaaaagctgacccgtagctgttttgccgaccgggatgcactggatgtggcgcgaacacaggcggcgctgtggcagacatggctgctgccggtgacggcagatacgccggtcggggaagaccccggctaccacgacgattttctgcgtatccgcgacgagatgaacaaactttccggcgcggatacggacctcatctgccagcttgccgaatccctgctgctgacgcaggcaaaagacgtgcgcatcgccacttactacatctgggcgcgactgcaccgcgacggtgagcgcggactggcggaaggactggcgctgctgaccggactggtggaacgcttcggtacgcaactgctgccctcgcgcccggccagccggaaaatggcgctggagtggctggcgggggaaaagatgctcgacagccttgcccgctacccggaagtggcaaaagaggattttgcgaacattgttgccgccctgaatctgctgacggtttccttcgccgcgtggcccgaagaccagcattccccctccctgatgccgctgattaacgcgctggaatcgcgtctggcacagtcgggcggaatgaacgcggtggtgccgcagaacagcagcggcgttccggcaccgtcatccccggtggatgcgccgcaggtacagaccatcacctccggacgtgacctgctcgaccaggcgaaagtgctggcccgttatctgaacgaacagccgcagggctggctttcggcgcaccggctgatgaaaaccctgcgctgggatacggtgcatgaactgccgccggacgtggacggcaaaacccggctggccccgccgcgcaccgagtcacgcaaccagcttaagcggctgtatgcccagcagaactggacggaactgctggagcaggccgacctgatgttcagcaccggcgtcagtcatttctggctggacattcagtggtatctgcatcaggcgctgactaaggcgggcgtaccgtgggacaggtggacagccgttatccgtcaggacctggcgttactgctggaacgcctgccagggctggaaaatctggcatggaacgacggcacaccgttcgccgacgaggtgacgcgcaactggatagcgcagcaggtcatgatgcgggaagacggcgcatggcttgcggggaaagccgctgtaccgacagacgacgccacaaatgacgtactggcgctggagccggaagcactggcgatggcagacagtcagggcgtggaagcggcgctgggctggatacagacccgtccgggcatcaccacggcacgacagcgcctgttattgcggctgctgatggcacgggtggcggaacagtacggtaaaaacgagatggcgctcctgctgctggaagaactggataccgccgcacagggaataacgctgacgcagtgggagccagaactgctgtttgaagtaaaagcccggcaactgaaactgctgcgcctgcgggcacatcgccacgcggacaaggcggcgcttgcccggaaaatggacgctctgctgggttcgctggtggcaatcgatccggcgcggacagcggtactgtgtgatacgcagcataaggactgatttcttatttgtatttcagattaaaggactttgatggacgacctgacccaacgctactatgaagccgaaatgcgctacctgcgtgaagcgggtaaagaatttgcgcaggcttaccccgaccgtgctgcgatgcttaatcttgataaacccggcgcacgcgatccctatgtggagcgcctgttcgagggcttcgcttttttaatgggccgcctgcgcgaaaagctggacgacgatctgccggaactgactgaagggctggtcagcctgctgtggccccactacctgcgaaccatcccgtcactttccgtggttgaactgtcgacagatcaccggcagatgaagcagagcgaaacgctgaaagagtttcaggtgctatcccgtcccatcggcgaacgcagaacccgctgcgtctacagtgccacgcgtgatatcacgctgcatccgctggcgttgccggacgtgtcattgcaatatgaaccggacggacgctcggttatccgtctgcgctttgcgtgcggcccgctggttggtgactggtcgcagatcgatttatcccgcctgccgctctatctcaatgccgacagcccggtagcctgtgcgttgcaccgggctttaacgcttggcacgcagcagttctggctgcgtctgccggggcaggaacgccgtgtgctggacgcgcacttttccccgatgggttttgatgacgatgaccgactgtggccgaaaggtgagtcagcgttcagcggctaccagttgttgctggaatatttcaccttccgtgagaagtttatgtttgtggcgctgaacgggctggagaacgtcatctggccggaaaggataaccggctttgagattgacgtggtgctggcggaaaactggcctcatgatttgccgtttaataccgacaatctccgcctgcactgcgtgccggtcatcaacctgttcccgctcgaagccgatccgttacacctttcgccgctggaaaacgaatttctgctgcgcccgatgcgcattcaggacgggcataccgagatttattccgtcgacaacattatttcttcgcgccataccggcagtcaggcgtatgtccccttctccagctttcgtcaccggggcgggatgctgcgccacgatgcgccggaacgctattaccacacgcgggtaaagcgcggcccttccggcctgcatgacacctggctgattctgggcggcgatgcatttgatactgaccggatgctggaggatgaaacgctctctttaagcctgaccggtactaacgggcagcttccccgtaaggctttacagagcacgctgctcgatacgccagttcatgcctcacagaacgtcctgcgggtgcgcaacctgtgcgctccgacgcagccctgctatccccctgcgcgtgaccgcttccactggcgggtgctcagtcaccttggttctaactttttatcgatgatggataacgccgaaattctgcgcggcacgctggcactgtacgactggaccgaaagcgagatgaaccgccgtcgtctggaggcgattgtcgacgttcagcacagcctgatacagcgttttgaaagaggctttctgctgcgtggcgtggatattcaggtgacgctggacagtaacggctttgccggagaaggtatatcacgctgtttggtaactgctgcaccgctttttcgcactgtatgccgatatccacttattcactcaactgaccttaattctgcaacccacaggaaagtgcctgcaatggacagagcatcacagccagcgcgtaccgggctgaccgaccggctggccccggatattgcgcggatcaatttttaccgtttttgccagttgctggaacagagccagcagaacgcgccgctgggcagtaccgacagccccgccaccgatgcggtgcgctttcgtcctcatcccggtatgggctttccggtcagcgagttaaaaaacgttgaacgtgacgcgggcaatcccgacgcgccccccacggtgcgcaccacctttctcggcctgtacggcgtggattcgccgctgcccaccgcctatctggactacattacccagcgtcatgacggacatgacgcagtgatggcgtttctcgatatttttaaccatcgctttattactcagtactaccgcatctggcgcaaatataactacccggcgtcgtttgaagcaggtgccgtggatgacatttcccgttgtctgctgggactcatcgggctgggtattcccggcagcgagaaccatatcgccacgccggtatcccgttttctggccctgctcagcgtgatgcgcctgccgacgcgcacggcggaaggcgtcacggcactggtagggctgcttgccccgctgaccaaagcgacggtggtgcctcacgatccgcagcctgtaattctcccggcccctgcgggtctgtcaaaaaattcacgcatcagcctgaaaacgcgaacgctgctggggcgtaccggtaccgacgccaacagccagttgctgctgaaactgtataccgaagatgccgcagaagcacgtggctggctgcccgacgggcaactgcacagcgatttgctggtgctgctgcgcgtttatctgggctggcgctgtcaggcccgtctgcaactgacgctgcccgtcagcctgttgcctgctgcccggctgggaaaacagcgtgtacagattagccgtaccggcatccttcgcgcctcctttgccgcgcccgcgaccggaacagtgacggtcagtctggggcgttatcagggattaatacccgctttttccattcgtaacagggagagtatgactcatgtttcctattcgttttaaacgtccggcgttgctctgtatggcgatgctgacggttgttctgagtggctgcggcctgattcagaaagtggtggatgaatcgaaaagcgtggcctcagccgttttctacaaacaaatcaaaatactgcatctcgatttcttctcccgcagcgccctgaatacggatgcggaagatacgccgctttccacgatggtgcatgtctggcaactgaaaacccgcgaagattttgacaaggcggattacgacaccctgtttatgcaggaagagaagacgctggagaaggacgtactggcaaaacacaccgtctgggtaaaaccggaaggcacggcatccctgaatgtgccgctggataaagagacgcagtttgtcgccattattgggcagttttatcaccctgatgaaaaaagcgacagctggcgtctggtgatcaaaagggacgaactggaggccgacaagccgcgctcgattgaactgatgagaagcgacctgcgactgctgcctctcaaggataaataaccgatgtcgacaccttccttatatgaaatgctgacgttcagtttcagcggcgagttaccgctggaacagatcagcgagcgggatcagcttatcctttccgtgatggacaatatgcaacgcattatcaactgccgggcaggcacgctggcgcatttgccggattacggtctgccggatctcagtctgatccatcaggggatggctgcgggtattcatggcctgatgcgtcagattgaagaaacactgctgcgttatgaaccacgcctgagtcagatacaggtggaattactcccccagccccgtccggggcatcttaattacctgatccacgcgcagcttcccgataccggctggatacgctttgatggcgtattttctccggaaggacgaattgttctgcgtcatctcaaacaacaggagcgggcgtactgatggcaagtaacgcgaattttatcagccagttcgtcatgggcggcgatccctgtacttataaggaatccggtgaactgcaggctgaaatgagtaaactgactcacccggcccgaccggatgtggactggcgtcaggtggaaaaactctgcctcgcgctgttccggcaaaatggcgtggaactacagacgctggtctgttacgtactggcgataaccagacggcaggggctggcagggatggcagacggactcggttcactggatatactgctccagcgctgggctgacttctggccggtacaggtacattccagaatatcactgctcagctgggtcacagaaaaaatgcagcaggcactgagaacgctggatattcagtatcaggatctgccgcagatctaccgttgtgtacagcatctttccgccatcgaaaccacgctgcaacagtgtgaactgtggcatatgacgaaactggatctactggccgggcagtttcgcaataccgcattgcgtctggaacggctggcgcctcagggagcggaaaccactatcactccccctgaattaccccgccgggaaatgaatcaaccgaaaaagtcagaggaaagtccacagccggtttttgcaaccagatccgttcagcaaaacgataaggatgccagtccacccgttccatcccctgaaatctcccggcagcggacatggccgatatttatggccggaatggttgtgatggccggtctcggcggaacaggattatggggctggtcgcagcttaatcagccggacgcgctaatccagcgaatacaactgtctgtcatgccgttgccgctgtcgctggagagcggcgaactggcaaagctggatgtaaaggataaggcgctgctggctcaggacagaacaattgcggcaagtcagatgcaactggagcagttaaacaaattgcctgcccgctggccactggagcagggatatcgccagctacgccagcttgatgccctgtggccggataatcctcaggtcagggcgctgaacgcgcagtggcgcaaacagcgggagctgagcgccctgtctgctgaggcactgaatggctatgctcaggcgcagagccagctacagcgcctgtcggcgcagctggatgcactggatgaacgtaaggggagatatctgaccggttcggaactaaaaacggcggtgtacggcatccggcagtcgttaaaggagccgccgctggaagaactgcttcggcaactggaagagcaaaaacagaccggagaggtttcgccaacgctgttgacgcaaattgatacccggttaaatcagttgttgaatcgctatgtcattttactggatacgaaggtggaacaaagtcagtaaacatcgggggatttatgtaccaataagggatatgtgaccttgccattttttaaaggagtctctgtgtacaaaaaaagagaggaacaggccattcgatctactcgttgattcacatcagataatgagtgtatatttcggtagatagcttgggttcgggaacagtgaataccttaagtttcaaaagattggattaacctcttgactgtggcccccgcaaccaatttattagaatgctgacaaaccgcaatgtgttctacaaattgcggtttttttgtatttaaaatctttgttcgctgaactcacaacacgttttttatctcccttcctgcgaagtaatcaattatcgactgggcaacgtgtatcccggtttgctggtatgactcaacggtggcggccgcgatatgcggcgttgtaatgatatttttggcatgtagcagtgggctaaattgcgccaacggttcagagctaaacacatccagcgccgcaaacacatttcgttcttcaatcacctgaagtaaagcgccctcatccagcaactttccccttgcgacattgatgagcagagcaccattgcgcatcatcgacaaatatttatgactaatgaagttctccagcccagaagaaaaaggcaaaagaacaatgatgacatgcgactgcataaagatatcttcaattgatacaaactgaactccagctttgtcagcaacctgatagtcgggttgtttgtcaaaagctaaaagctcaacatcaaaaccggataaccttttcgccagagttttacctatattaccgtagccaaccaggccaatccgtttcccttgtaattcacagccatgcgactcaccccagtagccattttgcatcgcatgatagctgccagggatatttctcatgctcgcgaagataagtccaatgataaattccgcaaccgcatttgaattaatcccaaccgcattattgacaacaataccggattgctgtgccgcacgaagatcaatattgtctatccccgtcccgaatctcgatattattctcacaccaggcagcaatgatagcgtgtccgcctgataaccatcttttccggcgatgaccgcgcaaatagattctcgtaatgcagtggattctgatttaagcagatgctccatattattcttaataataagattaaaattattctctcttagcaacttgctggcggaaacacagcgtgctgaaaagctggggacggtgaccagaacatttttcatagcggacactcacttcaaagaacgccaccccaaaagatggcgtgaccggttactgtatttatattttgaaattatgaatttgctttaatgccgagtgcacctcctggatgatataagccgaaatcagcacgagtaaattttttcaattcagagagtgcaagcgccaccgcatcaccaacaaccagaacaacagtcgacgagcatgacggtgctaaacctaaattatccgcctcacttttgacggggatttcaacagataaatcacaacttatcgcaagcgatgagtgatgactgcgggtaaaagagatcaaataattacccatttttttcaaactaggcagtgtcgccaggatttccgccgtctcaccactgtttgaaataagaataacaacatcgtctttcgccaccattccaaggtcgccgtgtaccgcttccgtaccgtgaacaaaaaacgagggagttccggtactggcaaaagttgctgcgagttttctggcaataataccggacttaccaacaccaataaaaacaacttttccctgacaagattgtaatactttaattaaattagcgaattcagaaagtggggaatcaataacctcttctactgctttaagttcgttatgcataaaatgtttaatgagatggataagatccgtgttattcatttttattctccctgattaatatttttaattacactcacaagacgcgtaagccccatatataatttttctcgaccgcaggccaggttcagacgaaggtagccctccccctccgttccatagacatgccccgccataatgcccactttgccttcatgaattaatcgactgtagaattcatcaaaaggataaccaatagcagaacaatctatccaggaaaaatagcaaccatcagctggccttacgatcaattctggaatattttcattcagatactgctgggtgaattgaatgttagaggcaatatgtgcctttaatgactttaaccatccctcacattcgttataggcaataatagttgcaattatattcagtactgatggggagtttacaaaatcgcgatacctcgatatcgttctgaacttatgattaaaattatcgtcagttgaaatcatatacgatcctgttagtgcaggaacattaaatgttttcgatatcgagttaaatactactactttttctttttttattttaagcgcggatgtaaagctacgattaaaaacaaaatcactatggatttcatctgaacataaccagacattatgccttgtacagcttgcagcgattttatgcagttcttcttccgaccagactgttcctgtcgggttatgaggattacataataacaccatctttgcgcttttaatcttaagatcaaaatcttgccagttgatagcgtagcccccctcattttttataatcaaagaggctgtcagaatatttcgctcgctatgtttaattacatcaaaaaatgcattatagacaggtgtaaaaacgagaatattatcaccatgcgatgtcaataactctattgcttttgcaatagagtacatcacactggggctataggttatccattcaggtttaatatctgtttgatattgttgataataccagtttactatcgcattcagatattcaccatgttgccaacgactgtaccctaaaatcgggtgttccaggcgtttttttaatgctctggtgatagcgtctggtatcggaagatccatatctgaaatagagaatggtagtacatcttttacaccaaatctgtcctcgcaaaagtcccattgggtacaatatgttcctttgcgggaaacaggagtattaaaaacatccatcagtatatccccatatagttatccatatcccgacgcagggcgatgactttagtgccgataatgacttgtagggtattttgatcaagtttaacaaccgcaattccgccggctctttttattgcagcctcgtcaagcaatcccatatctgcgattgttaaacgtaaacgagttacgcaattatccagtgacttaatattctctttaccaccaagtgccttaaccatctgctccgccgcttgcagctctgatttatcaggagttgggatatccgctatagccgtatcctcatgagcgttcagcgtgacaggactggactcttcacggcctaccgtcatcaggttaaatttgagaatagtccaacggaacacaaagtaataaatgaagaaataggccacttcgacacacaccgcgatcggccaacctgttcttgtgccacgcaatacgccaaagctaataaattgaatcagatcgccagtaaatcccatcttcacgcccatatatggcagaaccatgttagcgaatccattcataaaggcatggaagacaaacagcagtggactgacaaataagaacagaaactcaatcggttcgctgacgccgccaataatcaccgtaagcaccccggaaataagcaatgctttgatagcctttctgttttgagcatgagcagtgcgatacatcgccagcgcggcaccagccagaccatactgaatcatcagtttgccctgctccattttccccgccaaatccagcggaatgaccgcattctctttgacgtatgccataaacatgttcagggtgccgtaatattcttcgccaccaatcacagccgaaccgccgattggcgtaaagcggaaaactgacgtcaccagatggtttaagccaaaaggaatcgtcacgcgttcggcaactgcatagaagaaataaccaacaggaccggaagttgaaatccagtgtccaatgagcatgaaaagattgaaaaacggcggccagataaaaggaatgatcagaccaaatccactcatcacaatcagtgtaatgataggcaccagacgtgggccgctataaaaacctaacgattcaggaatgcgtaaattaacgatctttttatacatgctggcgactaataacccagcaacaattccccccaacacgctggtattgtaggactggatccccagaatgatggtttgcccatgtgtcgacatttggtcagcaacgaccaataagtcgtgctgtttaagataaaagttcgttcccagatgcatcgccataaaaccaattaagccagaaaaagcaccataggctttatcctctttatcttttaataatcctaagggaatcgctatcgcaaacaatacaggtaaattaacaaaggcaaacaaaccaagactaacaatgaaatcaagtatggttttaattattggaatagccagaaatggaattaactttgccatatcatcactggctaaaccacttcccagccctagcatcatgccacatacacttagcagagcaatgggatacataaatgccttccccaggctctgaaaaaaactccaggctttcttttgtttcatgtgggttatctcatataaatgttatatataattagtccattaatactttggtacgaatagagagatatagtttttcttctaaaattaattcatatttaaaagtggcatacagataccgttcaatttcatgaattgcgcgctgtaacaggatgtccttttcaagaaactgttcatagatatcaccaatatctttctgttttattttttcattgcataacacgcgacttgaaaaatatttaaggtgcatcataaatctggaatagttaaatgaacttctgtccacctttctgttataaacaacttcaataagctccgtgattatttgcgacaactcaataatccgtactgattcataatcaactgaattttcataattatttaaaatatgcaatgctataaaaccaatctcatcatcaggaagttgaacgctgaattgctcattaatgatagttaatgcatcgcgacttatcgcatactctgctttgtacaacgctttgatttcatcaaggaaaacattattaatttgtatacctgaaacgactcgggatattgcattcgaaatgtgatccgcaagaatcaatagtagcgatggattgagatttttttcgagatttttctccgcatattgcactattttttcggcaacaaacacatactcaatatctacatgttcaatcaatttatagagtttgtttttttgttcatttctgacataaaaaatccggttagccggatgctcagggaccaacattccatattttttgttgtaaccgacgccaggcccagaaatgataacctcctgtccattcatcgatgcctgcacacaattattgttcatgactttttcgatgatcattccatggctccaaaaaaaaaggcaaggcacgtcagaagtaataactacttcaaacattgccttgcctgatttaacagttacaagatgattaactaatgcgtatacattacacggaattgtgcttaattaaagagatggtcggcttatttttcaagccgacattcaaatatccgacatcagtcacaaaaccagcgtctaatattcaggtaaatgttatctattcaacgaaatataaattcattgaataaataaaaac

SEQ ID NO: 103 - DNA, 78 bp, Escherichia coli
gattgcgaaaagtctgaagcgcttgaattaagataatatagaaaatcagatacaacaaaaatggcaggcagatgatgt

SEQ ID NO: 104 - DNA, 86 bp, Escherichia coli
tgctccgctcatcaggcctggcactcttttaatatattgagctcgcaatattttatattacgcctcagccgaaacacacaaagcgc

SEQ ID NO: 105 - DNA, 3268 bp, Escherichia coli
gcccctgtggaatttattccactttgcagaatcacgaataagcgtagcaaaatcttttcgttgtgccgtcacaaaccctgacttatatcagaatatgactgatgcagcgtcgatattatccgcaatacgtccgagtttcggagtactccaatgatgacattgccctacccatattcttcctccgcacgtttttacgcgctgcgcctgctccccgggcaggaagttctctcccaattacgcgccttcgcgcagcaacaacaactccacgccgcgtggattgcaggttgtaccggcagtctgactgacgtcgccttacgctatgccggacaagaaaacactgccctgctaagcggtaagttcgaagtcatcgcattgaacggcacgctggaacagagtggtgaacatcttcatctctgcgtttccgatccacacggcacgatgcttggcggtcatatgatgcccggctgtaccgtgcggaccacgcttgaactggtgatcggctgccttgaggaactggcgtttagccgccagtcttgcgcgctttctggttacgacgagttgcatatttccccccgttaaataactactttcagtgaggttttcttatggcgcgtcgccacttttccagtcaggcattggtgttgatcgttatctctatcgccatcaatatgatcggcgggcaactggccagcatggtcaaattacctatttttctcgactccatcggcacacttattagcgcggtactgcttggtccggtgatcgggatgctaaccggtttactgaccaatttactctggggattgctgaccgacccgatcgccgccgcatttgcgcccgtcgcgatggtcatcggcctggtcgccggttggctggcgcgagcgggttggtttcgcaccctgccaaaagtcgttgttagcggcgtgattattacgcttgcggtaacggtcgtcgctgtaccgctgcgtactgcgctgttcggcggcgtgacaggaagcggagccgatttgttcgttgcctggatgcactcgatggggcaaaacctggtggagtcggtggcgattacggtgataggcgcgaacctggtcgataaaattcttacagcggtgattgtctggcttttactgcgtcagctgccgattcgcaccacgcgccattttccggcaatggctgccgtgcgctaaatgcatccgtttacatccttaacgctgtgggcgctggcggcctgcaccacgcttatcctgcccacacagacaatattgccagtctatagcgcggcgacctttttctgccttattgcgccaaaggccacgcggcggcgggcaaaatatgtcgtctggctgatgttctcgctgggggctggactgtggctggtgcacggtggctggctgacagaatggctaagcggcacgccacgctctccagaacggtgggcgcatgctattacgctctggttgcggattctggcgattgtttcaacctcacagttgtggatgcagtacgtccccgtgcaacgttttatccgcgctttgtttgcttctcgcctgccgccgggcgtcgcttatctgtttgccgggccgttattggtcgttgagcagttaaaacggcaattggcgattattcatgaagcgcagcgcgcccgcggcgtgccgctggatgagggctggtatcagcgtttacgtgcgatgcccgcgttaattattccgctaacacacaatgcgctaaacgatcttgctgtccgtggtgcggcgctggatatgcgggcatttcgaatcaacaataggcgcactacgttatgggcaccagccgatagcaccctacaacgcgtagcacgttacgccatgatattgctaatgctggctgaattcggagcgtggatatggttacgttagaacagtttcgctattgcccgacacactcaacgcatcctccgttctgttatgactttcactatgtcaaaccggggatggtcgccatctttggtgacaacggcagtggcaaaagtacgctggcgcagctgatggcgggctggtatccggactttctaccaggagagataaccggcacggggacgcttctcggtacgcccattgggcgtctcccgtttaatgaacaatccgccaccatccagctcgtccagcaatcgccctatttgcagctctccggctgtacctttagcgtggaagaagaagttgcctttgggccagaaaatctgtgtcttgctgaaaaagagattatggcgcggattgacgccgccctggccctgaccgagtgccagccgttgcgccatcgtcacccggcaacactctccggtggagagacacagcgtgtggtcatcgcctgcgccaccgcgatgcagccaaagctcttaattcttgatgaagcctttagccgcctgacgccgcaggcccgcgaaatgctgttgcagcgcttacaacactgggcgcttgaacgtggttcgctgattattctttttgaacgtcatcacacacctttcctgaaccactgccagcaagcgtggcaattgcaaaacggagcgctccagccactatgttaacgttaaatcagatatcttatcgctggcctggcgcggcaacggattgtctttgcgacatttctctgcaactcaaacaaggtgaatggctggcgctgaccggcgacaatggcgcgggaaaatcgacgctgttacgagtaatggcaggtcttcttacgcccacagccggtacggttatgctgcaacaacaagcgatgaaaaacctgaaaaaccgccagcgcgcggcaaagattggcgtactgtttcaggaagcggaaaatcagctttttcacagcaccgttgctgacgaaatcgcatttggtttgatactgcaaaaatgcccggcggatgaaatcactcaacgtaccaatgctgccctgcaatgctgtcagttagcagacactgccagcgcgcatccgttagatctgcatagtgcgcagcgacggatggtcgccgtcgcctgcctggaagcactctctccgccactattgctactggacgagccgagtcgggattttgacgaaaattggttgagcgtgtttgaaagctggctggagaagtgccgccagcgaggcactagcgtcgtagcaatcagtcatgacgccgcatttacccggcgtcatttctctcgtgtggtgcgactggaagatggtgtaatcaggaacgttaatccatcagacgatattcacccgtagcggtcatcattaaggtcaaatttgcaggcagactctcttc

SEQ ID NO: 106 - DNA, 1422 bp, Escherichia coli
  misc_feature (897)..(897): Unsure
  misc_feature (921)..(921): Unsure
gacacatgaaaggagaaactccacgagcaaaaataacaaaatattgaataacaacaacatgaaataagcttttaaaaagtcaattataaatctgttaagtaaactacaaaatcaacaaattattcatcactatatttgtgatacacatctctattttcttattgaatgctcgaaaacatacttattacgtttattattttttcgctcatcccctttataaattctgaattatcggctgttgtctgttttctcatcacctcatgtgacatattccccactttactcaaggaagattcatatgaaagcacctgtttcattaacctcatttcgcccacaaaaatctcttgctatcgccattggcgtgcttgccgtggttgtgctgccatttctctcgtattacaccgttaatgaaggtgaacgcggcattttgctgcgctacggaaaaatcgtaaaagttgccgagccggggctgggttttaagatcccttttatggaaagcgtagagaaaatttccacgcgtaatcaggctgtggtctatcagggattacaggcctacagccgcgaccagcaaccggcacaaatgacagtatcagtcagcttccacattaaaccttcagaagcaggcgcggtttataccacctacaacaccattgaagcattaaaagatcgtctgattgtccgtcagttgccaactcaactggagaacgttttcggacaatataccgccatcagcgccgtacaggatcgtacaaaactggttcaggatctgcaaaatgccatgcgcaaagccgttgttgggccagtggtaattgacggggtccagattgaaaatattgatttttctgacgcttatgaaaagtcgattgaagaccgaatgaaagcagaagtcgccattgncccccttagcaaaatctggaaacngagaaaatcaagcgcaatgcggtactcaggcccaggcggaagcagacagtaaactagcggcagccaaagcagaagcggaaactattcgcgtaagaggcgcggcagaggctgaaactattcgtttaaaaagtgcggctgaagcagaagctatccgcctgcgcggtgaagctctgcgggagaatcccgggacttgttgccctcaccactgctgagcgttgggactggtaaactgcccgataccatgatccccaggcagcacagttccgtttatctctactaagtaaaaaagggccgctttcgcggcccttgagactgatagcaaagacaaaactgcctgatgcgctacgcttatcaggcctacatacttcctgcaatatgttgaatttgcaaaatcttgtaggacggataaggcgttcacgccgcatccggcataaacaacgcgcactttgccaacaatctgaagggccgcatttgcggcccttctcacaaagcatcttaccg

SEQ ID NO: 107 - DNA, 934 bp, Escherichia coli
gaaacacaagtttgtgctaattatcgccttaaatgggcgaggcatcaagcgaggttgctatttccgacacggtggcggcgcatagccattgttatctgccggaaaggcttgtccagagcacggcggcagcgcgtttttcgccgggccttgtaattcaaaggcggcaaagccgattacaccggtattacgcacatcgccttgcgccgaattggctgcgtaggaatcagcaacgttggcgaactgaaaagccgcttcggtatgtttatctttgcggaatcctttaatcgctaacgaatctccggcattcacaatataaccgttgttattcagcgaaccttgcttgccgttcagcacatccaggccatcaaccgtagcaacgatctcgtagttggtgttacgactgtaattacggacatataattgataattcattccaactctggcatggacaatatagcgtggttcattattggatgaatcataaacccgcgtaataggtagagaattaaaattaccatcgcgaatagcatattccagttcgttaatacgaatgctataaacgcggtcgtagccggaaggaacattagtcgaataactaataacgatcatctctgccggatcgcgccaggctcgttcagcagatacgccctgaaccgttgagtgcacatccccaccccaggcggtgccgacattgcctgatgcactgctattatactgcgcattactggaacaaccagccagcagcacgattaatgccaccaacgcgctacgtactttccattttttcataaccgttccctctgcatttaattaatgcagcgattgtagggagattatttaataagaaaagcagctaaattatttttaagaatatataaaaagaaagcgggccgatttacgtaaataaatcgccccgccagcagaataatcttaa

SEQ ID NO: 108 - DNA, 100 bp, Escherichia coli
ctagcgcacagatttctgacaatgtgctcgttgtttcatgttggatgcggcgtaaacgccttatccaacctacagtgagtgcgaattcaaagttacgctt

SEQ ID NO: 109 - DNA, 76804 bp, Escherichia coli
  misc_feature (39751)..(39751): Unsure
  misc_feature (49372)..(49372): Unsure
  misc_feature (66539)..(66539): Unsure
  misc_feature (73693)..(73693): Unsure
  misc_feature (73705)..(73705): Unsure
  misc_feature (73737)..(73737): Unsure
  misc_feature (73759)..(73759): Unsure
  misc_feature (73761)..(73761): Unsure
  misc_feature (73766)..(73766): Unsure
  misc_feature (73774)..(73774): Unsure
  misc_feature (73781)..(73781): Unsure
  misc_feature (73798)..(73798): Unsure
  misc_feature (73802)..(73802): Unsure
aattcatataaacggacctccacggaggtccgtttttcgtttcagaacgccacaatttaagcgttctgcctccaaatcaattctaccgaactcaaccagattccccccacatcaaccccattgtgtgggtataattgcgggtataccccagttcgacagaatttgtaccctctttaacgcattcagaaggctgaactatggcactgactgacgcaaaaatccgggctgcaaagcccactgacaaggcttataaactcactgacggggctggcatgttcctgctggtacatcctaatggttcccgttactggcgtctccgttatcgtattctgggtaaggagaaaaccctggcacttggtgtgtatccggaagtttctctctccgaagctcgtacaaaacgggatgaggcccgaaaactgatttcggagggggttgacccttgcgaacagaaaagagctaaaaaagtagtccctgatttacagctctcttttgaacatatttgcacgacgctggcatgccagtaataaacaatgggcacaatcacacagcgataaagtactcaaaagcctcgagactcacgttttcccctttatcggcaaccgggatatcacaacactcagtaccccggatctgcttatccctgttcgtgctgcagaagttaaacaaatttatgaaatcgccagtcgtctgcagcaaagaatatctgctgtaatgcgttatrccgacagtctggcatcatcagatataacccggctctggatatggctggtgcattgaccacggtaaaacgccagcatcgccccgctcttgatctttcacgtctgcctgaacttctgtcgcgtattaacagttataaaggtcagcctgtcacccggcttgctgttatgctgaatttactggtttttattcgctccagtgaactcagatatgcccgctggtctgaaattgatattgacaatgccatgtggactattccagccgaacgcaaacctctgccaggcgtaaaattctcacaccggggctccaagatgcgaacaccacatcttgtgccactcagccaacaggctgtagccatactggcagaacttcagacatgggcaggtgaaaatggtctgatctttacgggagcacacgacccacgtaaaccaatcagtgaaaataccgtaaataaggccctcagagtgatggggtatgacacaaccaaggaagtctgtggccatggattccgggcgatggcgtgcagtgcattgattgaatccggcttatggtcaagagatgcggttgaacgtcagatgagtcatcaggagcgcaacggagtacgtgccgcgtatattcataaagcagaacatctggaagaacgtcggcttatgctgcaatggtgggcagattttctggatgcaaacagggaggagtgtatcagtccgtttgaatatgcaaaagttaacaatccactgaaaaggtgactgaacgccatttacacacatgctcttcctcttaaggggaagagcacccgcctcaatcaatttcttttttatgccggcggaaccatcagccaggctgaggttctcattcaataactcaacgtcttaccacagaacagaattcactgtattatcatgggcaacgttaatcccggacaataaaaggacaccgatgccaggcatcacaatttttatagcctgcaggttatggtccatccttttttacaggttcagaatatgactggcaaattacgctttgaagtgaacgataaccagggctgtttcatatttccggaaacctggtttggctcgttgctggatgagtttgaagaactgattgatgcatacgatgcggatgaaatcagcgaaacaagttacatcaacaaactcaggcgccttgcccgacaggagaatgactttattgatgtacacgcttacctggcatacgtatttctggagcagaatgccccgcgtaaggcgctgaatgcagcccttaaagggctggcagttggcaatcgtcttatccctgaaggtttcagtggcagaatcatctggatacatcctgacaaccgaccttttcttcgtgccctctatgcggcaatcctggcaaatgcacatttacagcgtcatcaggatgccatcatgctcattgaaaaaatactggattacaatcccgaagataatcatggtgcacgctggctactgggaccggaactgttacgcactggcgctcatgaacaggcacgccatatactgcaggaacatgcagatgaattttcaccttactggtatgaactcggccttctgcattttcttaatggggaactggtaaaagctgcaactgcatttcgtcgcggctttgcggcaaatacttacatcgcagaaatactgtgcggaaatctgcatccatttccacttgctgtatggcataacttttcaggcggtccggatactgccgaagattattatgccacataccacccgttatgggggcaatatccggaagcattgctgtttgtaaactggctctataatcattcctctgtgctgcatgaacgggcagaaatcattaaatgcgccgaaatgctgatgcaggaagatgatttcgaaatatgcgaaagtattttaagacagcaggagaagttgcgtgaaagaattgatgagacgctttctgagaaaattgtacagaaatgcagaaatatgaatggtgaatatgtctggccctggatattgccgttttcagcggcaggcatgaaacatactggcatacagtatcagtagatattgcattagtgtatcctgcacacaagtaataatttatccaccaataataacactgttaatgcccccttcccctggttgtcagccagggggtatcttctgaatatttcttttgaaaaggataacacagtaaattatttttatgaattatcccatggactcattaacaccctttcatgatgctttattgtcaaacacgttatggctgacatcaaaaaaaaccggatttcctctgctagcgggtaatcaccttcccggtgttttcggttggtctggttactcctgtctggttattagcaagataattgctataaacagtggaaaactcatcgtacataatctggtgatgattttcccctgaccggaagaatcagaggctgtggtttcagactgtctgccagtacattcctctctccgttaaaaaccataacgggttcattatcttcgtctgtcagcagattgaatggcggtatattttcagtacgaatgccggtcagccactgaaaaatacctgcgaaatgacgggcactgatttttctgctgacggactgatgagacgtgatgtcactggcggtaataatcaggggaacgctgtagcctccttgtatatggccatcatgatgaacaggattagcactatcgctgaccgacatcccatagtcagaaaagtaaagcatggcgaaatgacgggaatgccggcgaaggataccatcaagctgaccgagaaagttatccagtttactgatgctggcgaggtaacaggcaacctttcggggatactgctccaggtaatgattcggccaggagttaagccggtcacacggattcggatgagagccaatcatgtgcaggaaaatcaccttcggagaggatttatccgccagtgcacgttctgtttcctgtaacaacaacatgtcatccgttttacgggaagcgaagctgcctttcttgaggaaaacggtatgctccgcatcagaagcaataacagagatgcgtgtgtcatgctctcccagttttccctgattggatatccaccatgtgctgtatcctgcttttgctgccagcgccaccacgttgttgccggaatcagggttctgctcatagtcataaatcagtgtccggctcagggaaggcacagtactggctgctgccgatgtatagccgtcaataaataaaccgggagcagtattcagccacggtgtggttggcacgggatagccatataccgacatataatccctgcgcacactctcaccagtgacgataacaatcgtgtcatacaacggtacacccggcaggattttccagttgtcagccccgtgctgattcgtaagcgtcgtctcagcaccgtctggcagatcctgaaattcctgaaagaatagtggacaccaaatatggtggacgctatccatgaaatcattaaccgcagtgcgtaaaaaaagccctaattatcccgttgagttcaaaatcaaaatggttgaactctcgcatcgaccagagatctccgtagcgcaactcgctcgtgagcatgggatcaacgataatttgctgttcaagtggcgccagtactggcgcgaaggaaaactacgtcctccttcaacaacagaaaacaacgtgcctgagctgctcccgataacacttgatgccgaagatgttgtccctacaacctccccccggtcacaacctgtagctgctgcgacacctgaatcactcaatatcagctgtgaagtgacgttccggcacggatcactccgtctgaatggtgccatcagcgaaaatatcctgaacctgctgatacgggagctcaaacgttgatcccattaccatcagggacaaagatctggctggtcgctggcatcaccgatatgagaaacggcttcaacggcctggcggcaaaggtgcagacgacgctgaaagacgatccgatgtcaggtcacgtttttatcttccgtgggcgtaatggcagtcaggtaaagctcctctggtctaccggcgatggactgtgtctgctgaccaaacggctggagcgcggccgcttcgcctggccgtcagcccgggatggcaaagtgttcctcacaccggcacagctggcgatgctgctggaaggtatcgactggcggcagcctaaaagactgcttacgtccctgactatgttgtaagcctctttatcctggtcgacgctgaatgagcctggtaatatacccggtatgagcagctcacttcctgacgatatcaatgcactgaaacgtctccttgccgaacaggaggcgctgaaccgtgccctgctggaaaagctgaacgagcgtgaacgcgaaatagaccatctgcaggcacagctggataagctgcgccggatgaacgtcggcagctgctccgaaaaagtctcccgtcgtatcgcacagatggaagctgacctgaaggcacttcagaaagaaagtgatacccttaccggtcgggttgacgacccggccgtgcagcgcccgctgcgtcaaacccgcacccgcaaaccgttccccgaatcactcccccgcgatgaaaaacggctgctgccggcagcgtcatgctgcccggaatgtggaggctcgctgagctatctgggtgaggatgccgcctaacagctggagctgatgcgcagcgccttccgggttatccggacggtacgtgaaaagcatgcctgtactcagtgcgatgccatcgtgcaggcccccgcgccttcacggcccatcgagcggggtatcgccggaccggggctgctggcccgcgtgctgacctcgaagtatgcagagcacaccccgctgtatcgccagtcagaaatatacggccggcaaggtgtggagctgagccgttcactgctgtcgggctgggtggatgcatgctgccggcagctgtctccgctggaagaggcgcttcatggctatgtgctgactgacggtaagctccatgctgatgacacgcctgtcccggtgctgttgccaggcaataagaaaacgaagaccgggcggttatggacctacgttcgtgacgaccgtaacgccgggtcaacgctggcgccggcggtgtggttcgcttacagcccggacagaaaaggcatccatccgcagacccatcttgcggggttcagtggtgtactgcaggcggatgcatacgccgggttcaacgagctgtaccgggatggccggataacggaagccgcctgttgggctcacgcccgccgtaaaatccacgatgtgcacgttcgcaccccgtcagccctgacggaggaagcgctgaaacggatcggcgaactgtacgccatcgaggcagagataaggggaatgacggcggagcagcgccttgccgaacgtcagttgaaaacgaaaccgctgctgaaatccctggaaagctggctgcgtgaaaagatgaaaaccctgtcgcgacactcagaactggcgaaagcgttcgcatacgccctgaaccagtggccggcgctgacgtactatgcagatgatggctgggctgaggcggacaataacatcgctgaaaatgcgttgcggatggtcagtctgggccgcaaaaactacctgttcttcggttcggatcatggaggagagcggggagcgctgctgtacagcctgatcgggacgtgcaaactgaacggagtggagccagaaagctacctccgctatgtccttgacgtcatagccgactggccgataaaccgggtcggcgaactgctcccctggcgcgtagcactgccgactgaataacacatccctgtcaatacggtttttgctgcacgcttacccatggaacgtagtactcaccaataaataagcgtcaatacggtgctccgttgacgcttacagtcgcagagggaattgcttggataattcgccgatggaaagagtctttcgcagcctgaaaagtgaatggcttccgaaaggtggttatggtgattttagccatgcggtacgcgatataaaccagtggattaatggttgttatattataacgtttatcgacctcacacgaacaacgatggtttaccgccttgcttacatgaagaaaagtggaaacaggttatcccggtgtcctgattttgtgctccactacagaacttgtatcccttttacaaaggcagatacacataaccaccccaaaatatgccgcctgatgttataatggaagaaaaaaacgaaagcaggctccagtcgttgaatcagtcaacctgatatcaccaccgtgtagtaccagcatcctgcgtacaatcagcaatcccagtcctccccggggctcttctgacggttcatgacataacactgatgcccgccggaaaagatgagttcgcatatcttcagttagtccagggccgctgtcagccacttcgacgtgcaaccgattatcttcctgccagactttcagcctgatcgagccttccggaggtgtgtggcgtacagcattatccagtaaatttgttatcacacgctctatcattgaaatatctgccctgataagaggcagggaatgtgacatcataattcttagttgcaatcgacgggtttctatgctgagctcaaatttttgagctacatcctgaataagttcacagacagaaaattgctccagttgaggttttatagcaccatgctcaagacgtgccagctcaaaaagctgacaggatagatgcctcaccttgtgtccctgccggagagctgttgtcagatatttatgacagtcctctgatgatagcgaatccgacttcattgacagggtttccagatatcccagaagtgatgttaatggcgtccgtaaatcatgggagatattggcaataaattcacggcgctgttgatcactttctgaaagttgatcccactgacaggatattttacgggccagttcaatgaaggcattgtgtaatatctcgacctcgttgctagggggggtggcagggcgctgaattgccagttgtttaatggcactaatactgtcctgctctatcccgctgacattttcagttagttgctgtatgggacgggttacccagtaccagaccagcatacccgacagcagaccacatatcactaccagaaacagcgaccagtacagtgcattccatagtgcctttgtccaggctgcatcagtaagagcattaagttcctctccctgtaaaataatatacagatatcctttcagatcatccctcaggtaaagcggtgcggtactgaaaacttttttcttatttacacttcggggatcatcaccatatacgggccagacagcaccggagagaaattttttcaagggcgctatattgatataccgacgtttgatatgacctagaggggcggcctccacaagcagccgaccttccggcgagacaatatacagctccacactgggattaagcgtcatcagacgctcaaacagactctttaatgtccggtgattcacctgcccacgattatccagcagaggctccgtgatgacaatctgttgcgccagccctgcagataaacgctgtaccattgcattgccatacagattactgctgtaaatatgaacgccacatgtcactgctgcgcaaaacagcaaaacgactgtaaatactaggcttaacctctggcttaatgtcaggctacaattcatttatcgcattcctgcattgtcaactgaaaacctatacccttttccccagacggtctggatcatctttggctctgctgcatcctgttcaattttggcacgaagacggttgatatgcgtgttgactgtatgctcatatccttcatgctgatacccccagacattatccagcagtgaaagacgggaaaaaacttcgccaggatgacgtgcaaaccagagcagcagatcaaactcgcgtggggtaagatcaacctgtttattatgcaaatgaacttcacgtgaaaatggattgatgcacagatcgtgacagcaaatcagtccacctgccaggagaatattttgccccatggcttcctgacgacgaaacaacgctttgatgcgggcaatcagctccggaatggaaaagggtttcggtagatagtcatcagcccccatttccagtcccaggacgcggtgggtttcgctggtacgggcactgatgataatcacaggcagataacgggtcatctgacggatataacggcaaatctccagcccattaacattaggcagcataagatcaagtattacggcatcccaggtctgcttgtctagtaataaacgagctctggcgccatccgcttcatgaactatctgatacccttcatcctgcagattaagccgcaacagagctgcaatatcataatcatcttccatcagcagtattttttttacgttattcatcaaaagttatccacatattctttatctgaattttaccccagcatttgacgatgaattatcacattttttttaaactcttgtgaggatgtgatgaacattcctttccataatatacttagtttacagacagagatcacataatgcagccattaccgttaaaacaaatacatcctctgtggttacgctgttgccaccggattaatgctgttactgtcgcaggcatgatatgtagtggatggcgcatttataatgcttctcctttgttttcttttaactatccggcagcattaactctcggtggctggcttggtggtgcgttactgtggcacttcgccctgatgtggattctgctgattaatgccacgatctatcttactctgggaatttgtagcggacgtttccggagcaagtttttcccgctgtcatggacctcactgaaagaatcccttacgcaggcactgtatggaaagctgcatcatacgaatatgcaggaatacaatatggtgcaaaaagtcgcctatattctgttattttagatggcgctgctctgctattgtctggtctggttttatggaaacccgttcagttttcccttctgactatactattcggtggttatgatacagtgcgttatatccactttctgtgcatgaacattatggtactgtttattattattcacctggttatggtgttattggttccgcgtgcattgttatctatgatacggggtcactaatgaagaaaaaacattttttgtctgacagtgatgcccattacgtggtgaaagatgcagaaaaaatccttgcgccggacagacgtcgtttactccaacagggactgacgcttgggggaattatgatgctgactggctgtgatataagcaataatgatgatattgaaaaagcattgttccgtatatccagatttaatgaccggattcaaagttttctgttcagcaaaaacagtgtggcaccagaatatcttccagaggacattaccactccattcccttttaatgccttctatggagaagaagagatcccagtaattgatggccaggattataaattggaaatacgggggctggtacgtgataaccgtaactggtttttgtctgaattgtataacatgcagcatgtgagtcagataacccgtcatatctgtgttgaaggatggagtgcaataggaaaatggggagggataccattccggcatttcctgacgctgattggtgccgatatgcgggcaaaatacgtcagttttcgttgcgtcgatggttactacaccagtattgatatggcgacagcactacattcacaaacattgctgacattgacatggaataacagggtattgccaaaagaatatggctatcccataaagatacgtatccctactaagctgggatataaaaaccccaagcatgttcaggttatagaggtcactaatcattttccgggggggtactgggaagactagggttataactggtttggtggttgttgatacaattgttaaaaatgaggaggaaccatgaaaaatattatttctgtaactgtactatccgcgctgttcatgttcaatgctcaggctgcagacacaatggataaaacacatgaagtaaaaggcagcatgtccagcgcgcatgataaaatgtgcaaggatggtatgtgcaaaaatgcaatggataaagagaaaatggagaaagaacacatgagcaaaacggatgggatgaaaaatgaccacatgggtaaaaaagacaatatgtctcaataagttgagaacttaaaattacgttacgataaaacatcatattctgtcgtttttcagataaatagctcattatggcaatgtcaggctctgtatcggaaatgacattgcctttactgtgtattcgtaagcatcatttctgcgcagtctggcagatcctgaaatccttatgaaacaaagtatagtgagtgaaatcataaaaccgactgactggttaactggtctgatttgtttcagtcagttttcgttaaaattctccatgttataaatttaataacctgaaaattattaccgcgctaattaaatgtatttctttttgttattttttttctggagttttatactgatttaagtaatatatttcaaataaactcgtttttactatgtcttatggtgtaatgcgctaacctgtttcgatacggtaatagatatacccaccatattgaacatttgtagatcattattctatagtgctcagagttaaaatcgtctctggttgaattgatttgttacacaggattctggtcccggttgatacgggtaatttccggaagggcggtagcatgcttattcaaaatacaatatgagacacggtcgaagtcggatggaattaaatcatggctacagcatttttgtgtgtatgatataattttgcctcatattttagagtatacttgcgcacccgccaatagagtcgccttcttttgcgtgctgggatcgtactgtatgagatacactttgaatcattatccgaagtcagaagaagcgcattgactggtatgacctgattaattcaaccccttatctgacaggggtagaaaaagaagagaggttcacatgacaactcacaggtcatcattcggcagctgattggtactgggtaaggaagttatatatataagcaactatacatcttagatgtatgataaagaaaaagataacagttctttagaatgtgcatattgaagagaatacaatagcatggtttatataaattacgcataaaaataagcatatgtaagcattttggtttgcttttttttacctgccaccgcaatgaatgctttttttatgttaatgtgcgttatgaaactaaatgcaagaaacatatttaaaggattaatatcgttctctcacagactccgtttacttattcaagaatataatttaatttatagtgagcttattatgaatatgaacaatccattagaggttcttgggcatgtatcctggctctgggccagttccccattacacagaaactggccagtctctttgtttgcaataaatgtattacctgcaatacgggctaaccaatatgctttattaacccgggataattaccctgttgcatattgtagttgggctaatttaagtttagaaaatgaaattaaatatcttaatgatgttacctcattagtcgcagaagactggacttcaggtgatcgtaaatggttcattgactggattgctcctttcggggataacggtgccctgtacaaatatatgcgaaaaaaattccctgatgaactattccgagccatcagggtggatcccaaaactcatgttggtaaagtatcagaatttcacggaggtaaaattgataaacagttagcgaataaaatttttaaacaatattaccacgagttaataactgaagtaaaaaacaagacagatttcaatttttcattaacaggttaagagataattaaatgccaacaataaccactgcacaaattaaaagcacactacagtctgcaaagcaatcctctgcaaataaattgcactcagcaggacaaagcacgaaagatgcattaaaaaaagcagcagagcaaacccgcaatgcgggaaacagactcattttacttatccctaaagattataaaggacagggttcaagccttaatgaccttgtcaggacggcagatgaactgggaattgaagtccagtatgatgaaaagaatggcacggcgattactaaacaggtattcggcacagcagagaaactcattggcctcaccgaacggggagtgactatctttgcaccacaattagacaaattactgcaaaagtatcaaaaagcgggtaataaattaggcggcagtgctgaaaatataggtgataacttaggaaaggcaggcagtgtactgtcaacgtttcaaaattttctgggtactgcactttcctcaatgaaaatagacgaactgataaagagacaaaaatctggtagcaatgtcagttcttctgaactggcaaaagcgagtattgagctaatcaaccaactcgtggacacagctgccagcattaataataatgttaactcattttctcaacaactcaataagctgggaagtgtattatccaatacaaagcacctgaccggtgttggtaataagttacagaatttacctaaccttgataatatcggtgcagggttagatactgtatcgggtattttatctgcgatttcagcaagcttcattctgagcaatgcagatgcagataccggaactaaagctgcagcaggtgttgaattaacaacgaaagtactgggtaatgttggaaaaggtatttctcaatatattatcgcacagcgcgctgcacagggattatctacatctgctgctgctgccggtttaattgcttctgtagtgacattagcaattagtcccctctcattcctgtccattgccgataagtttaaacgtgccaataaaatagaggagtattcacaacgattcaaaaaacttggatacgatggtgacagtttacttgctgcttttcacaaagaaacaggagctattgatgcatcgttaacaacgataagcactgttctggcttcagtatcttcaggtattagtgctgctgcaacgacatctctggttggtgcaccggtaagcgcgctggtaggggctgttacggggataatttcaggcatccttgaggcttcaaaacaggcaatgtttgaacatgtcgccagtaaaatggccgatgttattgctgaatgggagaaaaaacacggcaaaaattactttgaaaatggatatgatgcccgccatgctgcatttttagaagataactttaaaatattatctcagtataataaagagtattctgttgaaagatcagtcctcattacccagcaacattgggatacgctgataggtgagttagcgggtgtcaccagaaatggagacaaaacactcagtggtaaaagttatattgactattatgaagaaggaaaacgtctggagaaaaaaccggatgaattccagaagcaagtctttgacccattgaaaggaaatattgacctttctgacagcaaatcttctacgttattgaaatttgttacgccattgttaactcccggtgaggaaattcgtgaaaggaggcagtccggaaaatatgaatatattaccgagttattagtcaagggtgttgataaatggacggtgaagggggttcaggacaaggggtctgtatatgattactctaacctgattcagcatgcatcagtcggtaataaccagtatcgggaaattcgtattgagtcacacctgggagacggggatgataaggtctttttatctgccggctcagccaatatctacgcaggtaaaggacatgatgttgtttattatgataaaacagacaccggttatctgaccattgatggcacaaaagcaaccgaagcgggtaattacacggtaacacgtgtacttggtggtgatgttaagattttacaggaagttgtgaaggagcaggaggtttcagttggaaaaagaactgaaaaaacgcaatatcggagttatgaattcactcatatcaatggtaaaaatttaacagagactgataacttatattccgtggaagaacttattgggaccacgcgtgccgacaagttttttggcagtaaatttactgatatcttccatggcgcggatggtgatgaccatatagaaggaaatgatgggaatgaccgcttatatggtgataaaggtaatgatacgctgaggggcggaaacggggatgaccagctctatggcggtgatggcaatgataagttaattggggggacaggtaataattaccttaacggcggtgacggagatgatgagcttcaggttcaggggaattctcttgctaaaaatgtattatccggtggaaaaggtaatgacaagttgtacggcagtgagggagcagatctgcttgatggcggagaagggaatgatcttctgaaaggtggatatggtaatgatatttatcgttatctttcaggatatggccatcatattattgacgatgatggggggaaagacgataaactcagtttggctgatattgatttccgggatgtggccttcaggcgagaaggtaatgacctcatcatgtataaagctgaaggtaatgttctttccattggtcataaaaatggtattacattcaggaactggtttgaaaaagagtcaggtgatatctctaatcaccagatagagcagatttttgataaagacggcagggtaatcacaccagattcccttaaaaaggcacttgagtatcaacagagtaataataaggcaagttatgtgtatgggaatgatgcattagcctatggaagtcaggataatcttaatccattaattaatgaaatcagcaaaatcatttcagctgcaggtaattttgatgttaaagaggaaagagctgcagcttctttattgcagttgtccggtaatgccagtgatttttcatatggacggaactcaataactttgacagcatcagcataatttattaatttaaataatagcaatcttactgggctgtgccacataagattgctatttttttggagtcataatggattcttgtcataaaattgattatgggttatacgccctggagattttagcccaataccataacgtctctgttaacccggaagaaattaaacatagatttgacacagacgggactggtctgggattaacgtcatggttgcttgctgcgaaatctttagaactaaaggtaaaacaggtaaaaaaaacaattgaccgattaaactttatttctttgcccgcattagtctggagagaggatggacgtcattttattctgactaaagtcagtaaagaagcaaacagatatcttatttttgatctggagcaacgaaatccccgtgttctcgaacagtctgagtttgaggcgttatatcaggggcatattattcttattgcttcccgttcttctgttaccgggaaactggcaaaatttgactttacctggtttatccctgccattataaaatacagaaaaatatttattgaaacccttgttgtatctgtttttttacaattatttgcattaataaccccccttttttttcaggtggttatggacaaagtattagtacacagggggttttcaacccttaatgttattactgtcgcattatctgttgtggtggtgtttgagattatactcagcggtttaagaacttacatttttgcacatagtacaagtcggattgatgttgagttgggtgccaaactcttccggcatttactggcgctaccgatctcttattttgagagtcgtcgtgttggtgatactgttgccagggtaagagaattagaccagatccgtaattttctgacaggacaggcattaacatctgttctggacttattattttcattcatattttttgcggtaatgtggtattacagcccaaagcttactctggtgatcttattttcgctgccctgttatgctgcatggtctgtttttattagccccattttgcgacgtcgccttgatgataagttttcacggaatgcggataatcaatctttcctggtggaatcagtcacggcgattaacactataaaagctatggcagtctcacctcagatgacgaacatatgggacaaacaattggcaggatatgttgctgcaggctttaaagtgacagtattagccaccattggtcaacaaggaatacagttaatacaaaagactgttatgatcatcaacctgtggttgggagcacacctggttatttccggggatttaagtattggtcagttaattgcttttaatatgcttgctggtcagattgttgcaccggttattcgccttgcacaaatctggcaggatttccagcaggttggtatatcagttacccgccttggtgatgtgcttaactctccaactgaaagttatcatgggaaactggcattaccggaaattaatggtaatatcacttttcgtaatatccggtttcgctataagcctgactctccggttattttagataatatcaatctcagtattaagcagggggaggttattggtattgtcggacgttctggttcaggaaaaagcacattaactaaattaattcaacgtttttatattcctgaaaatggccaggtcttaattgatggacatgatcttgcgttggccgatcctaactggttacgtcgtcaggtgggggttgtgttgcaggacaatgtgctgcttaatcgcagtattattgataatatctcactggctaatcctggtatgtccgtcgaaaaagttatttatgcagcgaaattagcaggcgctcatgattttatttctgaattgcgtgaggggtataacaccattgtcggggaacagggggcaaggattatccggaggtcaacgtcmacgcatcgcaattgcaagggcgctggtgamcaaccctaaaatacttatttttgatgaagcaaccagtgctctggattatgagtcggagcatatcatcatgcgcaatatgcacaaaatatgtaagggcagaacggttataatcattgctcatcgtctgtctacagtaaaaaatgcagaccgcattattgtcatggaaaaagggaaaattgttgaacagggtaaacataaggaactgctttctgaaccggaaagtttatacagttacttatatcagttacagtcagactaacagaaagaacagaagaatatgaaaacatggttaatggggttcagcgagttcctgttgcgctataaacttgtctggagtgaaacatggaaaatccggaagcaattagatactccggtacgtgaaaaggacgaaaatgaattcttacccgctcatctggaattaattgaaacgccggtatccagacggccgcgtctggttgcttattttattatggggtttctggttattgctgtcattttatctgttttaggtcaggtggaaattgttgccactgcaaatgggaaattaacactaagtgggcgcagcaaagaaattaaacctattgaaaactcaatagttaaagaaattatcgtaaaagaaggagagtcagtccggaaaggggatgtgttattaaagcttacagcactgggagctgaagctgatacgttaaaaacacagtcatcactgttacagaccaggctggaacaaactcggtatcaaattctgagcaggtcaattgaattaaataaactacctgaactgaagcttcctgatgagccttattttcagaatgtatctgaagaggaagtactgcgtttaacttctttgataaaagaacagttttccacatggcaaaatcagaagtatcaaaaagaactgaatctggataagaaaagagcagagcgattaacaatacttgcccgtataaaccgttatgaaaatttatcgagagttgaaaaaagccgtctggatgatttcaggagtttattgcataaacaggcaattgcaaaacatgctgtacttgagcaggagaataaatatgtcgaggcagcaaatgaattacsggtttataaatcgcaactggagcaaattgagagtgagatattgtctgcaaaagaagaatatcagcttgtcacgcagctttttaaaaatgaaattttagacaagctaagacaaacaacagacaacattgagttattaactctggagttagagaaaaatgaagagcgtcaacaggcttcagtaatcagggcccctgtttcgggaaaagttcagcaactgaaggttcatactgaaggtggggttgttacaacagcggaaacactgatggtcatcgttccggaagatgacacgctggaggttactgctctggtacaaaataaagatattggttttattaacgtcgggcagaatgccatcattaaagtggaggcctttccttacacccgatatggttatctggtgggtaaggtgaaaaatataaatttagatgcaatagaagaccagaaactgggactcgtttttaatgtcattgtttctgttgaagagaatgatttgtcaaccgggaataagcacattccattaagctcgggtatggctgtcactgcagaaataaagactggaatgcgaagcgtaatcagctatcttcttagtcctctggaagagtctgtaacagaaagtttacatgagcgttaagtctcagagccgcggtatccggctcatatcttctcctgtcatgtgtgactgcactgttttgtggcaaaccagtactgactatccactggaattcggtagtcattaactatggcattgatgtcctttataactgtcttacagggcgtataacacatcccgcgacggaagcttatcacagaggaagaggtaagcttcagaatggaaagtatatgagaagactgtgattgtttaaaaatacacaatccgctgtgaggtggagtcaggggagtgaggtgtactggcaatagcggatactaccatttgttctttttttaagcagccatctgatgatatttttccctgaaggytgccggggagatattccccagacgagagtgacgacgctgacgattgtagaaaatctcaatgtattcccgtattactgagatggcytcatcccggttattaaaacgatagtggctcaggctctcatttttcagcgttccccagaagctttccatcggagcgttgtcgtaacagttacctttacgcgacattgatgttttcagaccaaactgctcctgtatgacccggtaatcgtatgcgcagtactgtgaacctcgatcagagtggtggattagcccggcaggtgggcgctggctcctgagcgccataaacagggctttacctgtcagctcttttgtcatgcgctctcccatggcgtagccgacaatttcgcacgtataaacatctttgatgccagcgaggtacaaccatccctcctgtgtggcaacatacgtcaggtccgccacccagacctgatttggtgctgtaggagcgaacgtctggttcagcagatttggcgcaactggcagattgtggttcgagttcgtagtcgctctgaacttgcgtttctgcttacagcgtagccttaggctccttacgaagacgtgccagtcggtcacgaccaacgatgatgccattctctgccagctccgtctggagccgccgggttccatatgtttcgcgagtgcggatatgtgccaccttaatctccagttttagccgctcatcactttgttttctgtctgagggttcatgctgtacccagttgtaataaccgctcctggatacaccaaatacctgacacatcgcttcaatgggaaattgttgtcgccattgttcgattaacgcgtatttttcagcgactcctgtgcaaaatacgctgttgctttttttaatatatctcgctcaaggcgagcttcatttaacgccttacgcagttgcagaatttcagattccagttcagccaccgtgcgggaaccaggagtaccgagcccttttctggcggcggtaacccattgtcctaaagtgccttcaggaagagataatcgggaagcgccttcgctgatcgaaagttgattttcaagaaccgttctgacagcttcggctttgaactctttagagtaacgttggttttttctgctcattattagctctgtaagcgtacagcctgaaccgtctggtcagaatctgacaaattagacaaagtggtgtccaccaaataagtagtgggaaccaaagtgtcagatatgcagaaaaatgtgactcccggcaggcgaaaaggctgccctaattatcctcccgaatttaaacagcagctcgttgctgcctcctgtgaacccgggatatccatctcaaaacttgctcttgaaaatggcattaacgccaatctgttgttcaaatggcgacaacaatggcgcgagggaaagctgctattaccttcttcagagagcccccagctacttcctgtgactctcgatgcagctgccgaacagccagaatcgctcgcagaggacccggaaaccctcagtatcagctgtgaggtaacgttccggcacgggacgctccgcttcaatggcaatgtcagcgaaaagctcctgactctgctgatacaggaactgaagcgatgatcccgttaccttccgggaccaaaatttggctggttgccggtatcaccgatatgagaaatggcttcaacggcctggctgcgaaagtacagacggcgctgaaagacgatcccatgtccggccatgttttcattttccggggccgcagcggcagtcaggttaaactgctgtggtccaccggtgacggactgtgcctcctgaccaaacggctggagcgtgggcgcttcgcctggccgtcagcccgtgatggcaaagtgttccttacacaggcgcagctggcgatgctgctggaaggtatcgactggcgacagcctaagcggctgctgacctccctgaccatgctgtaaatctctttatcctggttgtcacagaataagcccggtaaaatacgggcttatgaacgacatctcttctgacgacatcttcctgctgaaacagcgcctggccgaacaggaagcgctgatccacgccctgcaggaaaagctgagcaaccgggagcgcgaaatagaccatctgcaggcgcagctggataaactccgccggatgaacttcggcagtcgttccgaaaaagtctcccgccgtatcgcacaaatggaagccgatctgaaccggcttcagaaagagagcgatacgctgactggtagggtgtatgacccggcagtacagcgtccgttgcgtcagacccgcacccgtaagccgttccctgaatcactaccccgtgtacagcctgatcgggacgtgcaaactgaacggagtggagccagaaagctacctccgctatgtccttgacgtcatagccgactggccgataaaccgggtcggcgaactgctcccctggcgcgtagcactgccgactgaataacacatccccgtcaatacggttcttgctgcacgcttacttagctccttctgatgccattctatttcaggaaggagtgtccgttaaactcaggctacctcactactgtacagcctgatcgggacgtgcaaactgaatgacgtggatccagaaagctaccttcgccatgtgcctggcgtcatagcagactggccggtcaaccgggtcagcgaactgcttccgtggcgcatagcactgccagctgaataacacatccccgtcaatacggccctcgctgtacgcttacaacacatctgcaagaatcattattcttttgcctgaagctatccggcatactcaggcatttcacgctttatgagctgacatcatcaagatgcgccagtaattttttattaatgacttcaaacagttcctgttcatcatgggtcagataaccccagatttctttcagatacatgctttgtgcaagagtgagcctctgaataaaaaacataccttcagatgtcagactgatttttttagcacggcgatcctccctgctatccatcctttttacatatccggctttttctaaaaaatctgtaatgcgggtaatattagttctggtaaactgaagtttctggcttatctctgaaggtgacagacaatgactctccgctgcgaataatgtggtgagaaccatatatactgagtgatttattccatacacccccagaaattcagatatattatcctgcattcttttatttgtgcgaatacagagttgcatcaacaaatgctcccgaaagggatatgcggggtctttgtttttttggtgtctgattattttttctaatgtgtctgtgttattcatttcattattctccatattactgaaacacactgtctgtgtacaagcgcgcatcagtcatccggtaaacatcgactttccactacaatttattcctgcctgatttctgtataactgagatattcctacacagcagacagataaattccctcagataaaagaacataaatgctggctgctgacaagtctgtgaaaaaggattatccatactgctcagtaatcgcggatcattcaccagccctccgcccgtctgaaaggtgacttcccggggcatcccagatatccacaacactctatccggctccggataaaccatttatggcaatatcatgagcagcgttgctgaaccagatagtactcctggttgtatctttgaagattcaccatagaggcgactgccgatggtcaggttttgtgtacctgctttgtaccatctcatcgttgtctctcctgtgtccaccccgttaactgaaacaatggagtcccagccatgccccagaccaaccgaaaatttcttaccatggctgtatgtcggagttgtatttcttaacagcataaaacgaatatttgcaggcacatcgcaagacacagaaagagtctgagccgcataatgattattagcgctattaatagacagatcaccatgctttatttccagagactgtgcagaaggacggcatccgccgatattcttaaataagaataacatttcattctctcttgggagggttttggccacattgtatgggattttaaaacgggcccccaagtaactcgcgaaatgacgctgtatgccggaagtgtatggaattgtaacagaataatcccctaaaggaagatctgcaggtaaggcgactttaaaaataatatcgttaaatttctcagtcagacgagttgtttctcctggtttctgacacaaattacctgcatcaaaggcccgctcatcccacttataccccttgagaaaaaaatagctgtcattgtcaccagtattctcctcactccagctacctttattatgaacctcaataaataagggatatccatttttggtcataacctttttggggaatactacccacgcaatatactccctgtagtaagcccaggagccatcagcgaactcaggaccattacactgattccaggttaccgtagcaatgcccgggcgccacgaagttataaattgtggcctttgagtaatcaccacattccctccctgataagagttaacgtttccaagggagtaaaagacaatattattccatgcagaggactcaccagacacacacaaggaaaataacaaagctgggaaccattttttcatcagaaatcacttccgtaattacagttattcatttaggtatgactcagttataaatcatgctcatactggccgtggtccggaaatccccgccattcagtgtcctgctgccattacgaaagggcactgaagtaaaggtgaacgttgaacgtgctgtgtccagacctgctgtcactctgtaaccatttcctgaaccattacctaatgtaagaggtgttgacattccttttccctgatacaacgctataccaaaattggctatatttgttgccagtacattagtctgcccagccattgcattacctgtgacctttatccagggtgagccactcttatacgtacaggatatgcttatggtttttgttacctcaccacgtgagttgtccacgtgctcaggattaatattcccaaaatcgacaacaatattctgcccgttattaatggtgcatggggggatataaacatttcccctgatgttaatctgcacatcagccagtacagcgaccgatgtcagaagcaacgatataaataatgataaacgagccattccccctccggagagcggtacagaaaacattttattttatgagatataaaatcggcgtattttagttgatactattacgaatatgatgcaaccagcgttgctgtcgcagaaaaatccccagccttcagactctgcatattccctttatatccaagtttggcatgaagtgatatagttctatctgcattattacctgtgatttttccgggcgtaaatggagtccctaaagttatcgcagtcccaatatttcctgcattactgttataaagataaacaagtaccccatcagaagatgtgtttgatgtattctgaactaaaatagcattgttataagtgtttgttgccgttatcgtaaccttcattgttcccaaatgataaggacactgcatattcacagtaaactctttttcgtgatttccattttgactcagggtctgaatctctacatttccccagtcaacctctgcctttgttacagtacaggcaggaataatcagttttcctttaaaggtcagattatcagctgcatgtacatgctgagacattaacactgcccccagcattaccggaagacacaaacctcttatctttttcatctgaaatatcctgtacaaaaattttgctaacgatatgtcaattcaaacgtggctgttgcttcataatcaccgggtaccacactcttcgtccgcagggcttccggcgttgccacaacatacgcgccgaaaggaagctcaagactgtttccggtaaccttttctccctggcctttgttatgggaggtgccgggtttcagcagactgctgccatcggtgtccagcagtgcaatgcctaaccggccggcattcactccggttaccttcagatggcccgggagggccgcctcttccgttcccttaaaggtcagggtcacaattttgccaactgctgttgcatggcagttttccagcctgatgacaaacgactctgtcggcgaacgtccgggcggataccagaaatccctggacgcccgggttttgaagacgacatgtttattcagactgtcaccggacacatggcagggtctgtcaagcagattacccctgaatgccacatctgaggctattgcctgtccggcagacagtgcggcaaacagtaaaagagcgcctgtgctttttatcatcacattcccttactcatattttatgctcagacgcagcatggccggattgctcctggcatcagaatactcaccctcctgtgccgcccttttcctccaggctgccagcatatcctcctgccgccggtcaggccggcacagtaaaaaggtatcaccatcatgtataacaagatggtcacagccggatagcttacggtcaggaagtaaagcacttccggttccgtgaccggttaccagtgagccggagactgtcatcgcaacgccccgttttccgggcagaagtgcaccaccgtccccacatcctgccagcctcagcatcagaggagctccggctgccgcagagtgattctccggccggaggcttaacggcacctcattactcaccagcgtgcagggtgaggacagcagtgcaccactgactgccaggcttccggtgcgtcccccccgttcatttatccggtaatgatgcaactcatctgcagtaaagacgtcatcgtatataccccgctcttcagcccgcaggaaagtatggatgaaaccactcagcgacagtgcaataagatacagtactgctgttgttttattcacaaccataatatcccacccgcatttaaccgttattgcggtacattatttctcttttttcacagagcaacggctgccattacagataaacgacagtaccgggcgaccaccatagtcgttaatataagacagataaggggtattataatttgccgattttactgtctgctctgaacggggagacagcatcacggtttcaaactcaccttcctctgcctgcttttcacttcctcccagaccaataacagtgacataatagggggtcgggttttcaatacgatacccaccgctgactttgttcagaattaactggtcctgccatacttcatttggtctggttttaattgctgccgggcgataaaaaagctttattttggtctgtaaggctatctgcagtacattggccttttcactcctcggcggtatttcccggagattaaaataaaacagtgattccctgtcctgaggaagtttactgatatccggtgtggtactcagcctgaccatgcttttcgcacccggctcaaggcgctgaaccggaggggtggcaataaccggccctgcaataattttttcctgattttcattttctatccatgcctgagcaagatagggcagttgtttgttatcattggagatatcaagcgtcattgacttctcactcccgtcaaacaccgcgcgggttctgtccagcgaaacagcagcgtctgccccggatataacaaacagggggatggcagccatcagaatcttttttcgaatcatacttaatttccacattctgtaatttcacctggtccggaaaatggcataaccgcattcatcagccgttaatattccggactttcatttatttctgaggcgtacagggaagcaataactgctggtcagatattgctgtctccggtacatttacctgacactgtatttttccatcccagtttaccgacagggtttcccccggcgtcacgccactcagccaggcaaggccttcgtcggccaccatgcccagctcccggcctttttcactggttacactggcaccaaacgggggctgagagccatcagcaagacgcagtattgcaaacagacgtttccctttaagcacgctgaatttccggtaaccaatggcaccttctgtcagcgccgattccacaacagaacgggttgcttccacatcatccggtaagcgcttcaggtcaacagaggttgtattccggtaataactgctgatgtcagtcaccacgcccgttccccagcgatttgtcaccacctgcccgccatcaaccggtacacctcccacaccatccgtgtcaacaagaagacgtgttccaccggacattccccctgcatgtaacgccgcaccttttccggtaattgttgccccaccggaagcactgacgccgaaagacgtatatcctttctgcagggatgcaatattcgcggacaaatttgccagcggactacgatgactgtaataggcattaatctgacgttgcgatgtcagtccaccgccactgttaaggccggcgttcaggctgtagctgtccagaccgtcattgaacatgtcagtgtagccggccatattcacataacggtcattactcatactgccactgtagctcgctgtccccgtccccagcggcacggatatacgcaggtaagcagaatcgttatcacgccccagatatttagaccttgaggctgacaatccaaccgccacaccctgcagtccgaaaacattaaagtagcggttgacgctcaccgtataatagtccgttttccgtatgtcccagtatgtctgacggctgtactgcaggttaaaagaggtgttccagtccgccacgtttttattcagcgtaacggtatacatctctttttcccgactgctgtaatcattacggtagcgggcgttcaggtactgctccatggtcatatagtttcgctctgagaaacgatacccggcgaacgtaatgtcggcatccgcattatcaaaccgtttggagtagctaagacgccaggattttccctgaaacgttctctctccctcaatacgggctactgactgcgtgatatcagcggaaagggtccccggcacacccaggtcccagccggcaccggctgccagtgcattataatcaccggcaagcacagccccgccatacagcgaccactggttactgagcccccaggacgcctctccggttgcaaatacaggcccttcggtctcatgcccgtatccgcgggagcgaccggagacaagtttgtaccggacctgtcccggacgcgtcagataaggaaccgaggccgtatcgacctgaaaggttttcttccgtccgttctgttcaataacctcaacatcaagacgtccgcgaactgaactgtccaggtcctgaatactgaatggccctgcggggaccatcgagtcgtacagcacccgtccctgctgcgacaccacaacacgggcattagtctccgcaatcccggtaatctgcggtgcatagcctcgcagtctgggtggcagcatccggtcatcgctttccaggctggctcccgtataactccatgaccggaatatatctgagttgatattattctcgcccagcgtcaggtttgcccgccatcgtggaatggcacggaacagataaaagcgactccatgtgaaatttctgtttgtcgttttttccccgttgtagcggctctgctcctggcttccctgatagtcagcccgcaggcgccagggccccagattcccccccacagtcccgttataactgaactgatgagagtctcctccctgataattacgggaaaccgtcccgttgaggttataatccagcatcagtccgggaatgccgtcgtcccagcgtgagggaggcagccaggtggcatcagaatactcaagccaggcctgcggcatattgatgcgtaatacgcccgctccggtatcaggacgaatatccactcccggcaacccatgaaaatccgcacactgaccatcatgccagtaaacaactttatccagagattctgctgttaaccccatcagtctgaccatatctgatgtcagacaggcctgtggcaattttttttctgccttatctcctgacgactgaggttcaacaaatgaaatctgtaacgatgcgggagaaatactttgcccgttaacaatcacatccagaagatattgccccggcagaacataaccggcttctgaaaaacgggtgaagtcaatatttttcttgtccgccgcgtcaagtacatctgtattaaactcaacggcactggctgcgttacaaaacagagacaacaatatcacacaggtaatattgttgactgcaaaaggtattctgtctttcattccacgcatcaccagattcacaaaaaagataaataaccggacatctcaccggagtgactcactcataatcgacccggaatcccagcacggcaaaataatttccggcttcaagtttttttccgtttcgcacaattctgagggtgtaatccagcgcttcttcattacccgtcaatggtattgcaggcattactttccctgcccgggcaatatttcccctggcatcagctatctgcagattaatgccttttgcctgaccggataaattaaacttatccggcgtttcaccccggacaccatcgaaagtcacccttatccgggaatcagagaaaaggttcccaccctgactgttaaattcacagttcctgagccggaggctgaattttctttcaggtccggaaaaaccattctgtaaatcccgaaccggggtttcccccatatcgataatctgccaggcgtcttccatcgccagagtacaggcaggtctgacaacctcaccatgaaaagcagccctgccgtcccaccatacgtgttcttctccccagtattcaggaagggacatgccgggcggaggaaacggaccggcaaaaacaccatgaacaaacacacagcaaaaaaagaaaagtggaacagagaatcgcagtctcatgataaataccctgagaaataaacagcggaatatttccgctgtttaccggaccagattatcgtattactgttactgataagtcaggttgaaattcgcaactgctgagaaagcaccttctgttacagggttgccactaccatcttttctgacggcagcagtaaaatgaattgtgttatcaccatcaactaaataggaaacacctgttgctgtcgcaccatcaaattttacgcgttttccatgtggatcggtgacaacaatagctgtatttgttgcaccgacggtctgtaacatgtcactctgcggaccacttgggacacccgaaaaagtcagagatactgtgccagtcttcgccccaccaccgccagcagcttttttaaagtttgtaatatcacaatttataagtttaatatcaaaagatttgggttgactttccccatcattctccagaaataattttgatacttgtccaaaatcaatagattgatcagcagactgagcatcaataccacatggtgcatctactacagttccgttaaaagttactttaccctgcccctgaggaatagttggagcagcatatgcaccaaaagacaccactgccatagctaccgcaccggcaataaccgacttaatcataaataacaacctctttttcattactgaacacaccagagatatctggcaatttaaaatgacccgattacctttaataaccagatcaatacaaataatattctcgtatttcagggcaggttatttatcgacagaatactgatataacctgtctgctttctgataagggcttctttttttatcttccagaaactccggaatgccataatttagtcaaatgccgaggactcatctgtataataaggtgcaagccttgctgcaagagcattcagccgtataagtctccccagtgttgtactgaaatacccattattcatctggtatttctcgcagacctccttacgggagtgcccacctaccagatagtccttcatagccagaatgaccctgtcactgtgaatagaagaaatacctatcagtaaaaaaaaatgcatttcagacatagacccgggcaacagtacgctctcgcgtatattcagcaaaaacgcatttcctgaccgactgatgacttcatgatgcgccatgtttcccccttctgtcgggcccctggatatatgcttccggcccggaaatactcttcacgcaataagttaaatttagttttttatgttgtaaatattgatttaaacgatcttttaacccacaaaacaaaattaaactagaacaaaacactaatagcaagagggtactcagataaaaacatcatggcgaattgaatttacagcataaaagatcgtctaaatgaatttttacggactttcttttcgcagaaaaataaaacgcaaaatgtgatacacatcaaataaatccaataaaaagcaaattcactaaattgaacaaataaagcaaacatagagaataaaaatacctttccgttgataacagagagcatgatttttattattcgaagaaactttgttacagtgagatgagtgaatatatgaagaatgaaatactggaatttctgaacaggcatgatggagggaaaacggcagaaattgcagaggcgctggcggtaacggattaccaggcccgctattacctgttattactggaaaaagcaggtatggttcagcgctcaccattaagacggggcatggcaacatactggtttctgaaaggagagaagcaggcggggcagagctgttcttccacaacttaataactcaatctgtgggcatgcttcactgaaacagataaaagttacatcagagtacagattcaattttgcagcattcatcacaaaatagaaatttagtattttatggcagaatacttcacatgataataaaaacctgtctggatttactgcatggccagacattacaaaatacaaacgccataaacttcattcagccttcttgctgtccggtaacggaggctgctttttcgttacacctttccccggcagcatcagtagcagtaatttatagattctacgaactgagactgtctgtccggggagaacgtacacagcccgacacaatgtaccagtcaataatatccggtttctgattccctgcctgacagaccactctctggcaactttgtattcagttcatctactactggagacagatttataaaatccaactccacgatctttgactgtccgcatcccctactctctgtgctgcggtcatcggttaattccagcgtccgtccgttacgatcagatattactgaaccgccccgggtttcctggagagtgttttatctgtgaactcaggctgccagatcattgtttccgatggaagcataataagctttttctgcttctgccggaggagtatggcccagccttcccagcaatcgtcgattgttataccagtccacccacgtgagtgtggccagttccacttctgcacggtttttccagatcttacggtgtattacctccgctttgtaaagaccattgatgctctccgccatcgcgttgtcatacgagtcgcctgtactccctgttgatgccagcagttttgcttcttttaatcgctccatataggccagtgacacatactgagagcctttatcgctgtgatggatggtgccggacggacggcgggcccacaacgcctgctccagcgcatccagcatgaatgtcgtttccatagacgatgagacccaccaccccacgatgtatccggcaaacacatcaatgatgaacgccacatagacgaagccctgccatgtgctgacgtaattaaaatcagccacccacagctggtcaggacgttctgccacgaactgacggtttacgcggtcacctgcagcaacggttttccggctgacgtagtgcggacctttttaccccggagaacaccggcaagtcccataaccgccatgaggcgcgccactgtacatctggccaccctgattccttcccgtaacaactgacgccagactttacgcacaccgtacacctgatgattttcatcgtatacgcgctgtatctctttcttcagccagtcatcgcgctgcgcacgggcactgcgtttatcaggatgatgtctctgctgctgacaatggtaatacgttgacggggcaatatgcagttcactgcataccggtccgaccccgtactgctcacgcagcttatccagcagtggcattattttttccagaggcggtcgaactccgccttcgcaaaataagcggaagcctggcgaaggatatcgttactgcggcgcagttcacgattttcacgttccagctctttcagacgctgacgttcagcggtggtgagcccaccatcaccgcccccggtatcccgctcatgctggcgaatccagacacgcagagtctctggcgtacagccagtctttggagcaatggaacaaattgccgccctttgtgagtcatattcgtcctgactttccagaaccatacgaactgcccgttgacggacttcgggggaaaaacgtgtatttttagtcatcctgtttacctctttctcagggagtttagtctccaggattcccggggcggttcacagtaatcatgccgggtctggctggctaacaccccattataaggggtacgaataaagtaacggggcttcacgcagggatggacagattgctctgatatacagccgacgacgtcccgctgcaacatcatcacgcagatgcttcattttcagatttgggacctccttttgatttctcgtttaacttttgctgttaccagactttaatctattttaacaattcaagaattttttataaaatgctcaaagatgaaagcgttactgaaccaaccagcttggctgatgttttctatagataaaaagatcatcagcaaaaactgatagcctgaatcacctttactaccaatcatgtatgaagaaaacacgcacaaacaattgacaatgattatcatttgcattaaaaagactacgtagtatttttatttcatgaggaactatacccgccagcaatctgagtagcgaaagctgttcatccccaatatttttgctggcgggttcttttttctactgcccttctcctcagagggagcattccattctttttctcattaatggcgagggggcgggacaaaaagccggttctttatccctaaataacagcatgatttcagtccatgcaaaatctgatttaccagctcacataataacctgatgatacatgggttttccctgatcatgatgggaaggctcagaacgccatattcagtttcccgtagtggaacatcacgcccagcttaaagcgctcccgatttcggtatcccctggcttttatcctcagtagcctgatcttactgttaagcgcctccgcgtttccgtttgagacacatggcattcaggatcccgtaaagcctttttcctatcgttttcgcggcgtttttcatcataggaacgtcactgttggccgccagagccagccatctctcccagtcattacgtctttcctcactccatggcctgttccagatatcctttgccagctctttcagcgcccagcactggcttgtcagcttcatctgtgcacgcagccatatcagcttttcctgcctggatttggtcatccatttatcgctgtactgccacaggaagcgggccccctttgcctgacgccaactttcaacagggaggtgcggatgttcattctgacgggttttatcaaccacttcgccaagttgctttgctacatggaagcggtcgaaggcgattttctcaaccgcacagggtaagtggatacgcgctgctcttatatagcctgcattcatgtccattgagagcgttttgatagccagcaactgctcgtcagtaagcgtgcgaagatagccggcgaggctctctgtgccacaatcgtccgttaaggccagcgcacgaccatcgcgatcggagatcaccgttatataacgatggccttttttaaaggcgacctcatccacattgtcagcaccagtgatataagacggatagcaaagcgcacgcgctgtttgtcaccgtgaaaaacgacggtgcgacggcaaaagccaataacaacgagagcgtcgtgcgcattcctctgcactgacagttgattcttagaacgtagaggcctggattgctgccaggcttttattgcactaccagctacggctaaaagataagcgtcccgggaagtacatagcgcttacaaaatatccgacatgaagcatactggaaacgaggcgtattgttattgttgttcatattggcttccgtggcggaaatatcagggggtagctacatatcccccatgcagccaaggcaacgatgttaactctcgtcacctgttcctttcgacagagccaacctcgcagagggccagatcttacaacttcacctcagtgatacaaaacacaaaaatacaaaacaatttgatacaaatcatccctcttattttaaataaatccatcttgcaagcctaccaatcagaaggtagcatgtgtagtatcgcaaacataaagagaaactgctcatgaattatgttatctgcactaccattgtcgcccttggtctcattctgacaggctacgcaactgctgcagatgaaattaatcgtcaggacgttgttggtttgatgccgtcagactatatttctgttggtaatctatatacaccagaagaggtggcaactgcgcttaaagacaaagcggagcaggcaggaggttctcatttccgaatcacttcattgggaggaaaaaataaacttgatggaactgccattatctatcgttaaaatatgtataatagtccctttaatacataacaggtaaagccgtgtctacttatgagaatatacttcgcataacggatactctgatccagcaacgcggatttttggggttcagttacgcagatctggaaaaagaaattggtatcagaaaagccagtattcatcaccatttcccgaggaaaactgatcttggtatagcctactgccaatacaaaacagaagtatttgatagacttaatataactctccataatgtttcttctggtgtacaacgtctcaggacatatcttgatgcatttgctggttgtgctgaaagaggggaaatgtgcggtatttatgccatgctatccggacagccatcagttttctcctgaattacaggaggctgtaagtcaactggcacatcaggagatacagatgattaaagatattatcacctccgggcagaatagtggagagttcaaaacagttcttcttccggatgagctcgccgttatagtctgttctacactaaagggggcactgatgttaaatcgacttccaccacatgatacctattcaggaaccgttaacgctttaattaaaatgcttgatacccgtacttaatcctttttagtgcatataattttccacccggagaatgaaatgaaaaaatttattaatgtttacattaaatcagattatgacatagttattcttcgcctgtctgttattataatatttatgctcttcgggacctataaatggtttgattttgaagtgatggccctcaagcccctgatttctcccacgtggctgaatatcctgtacattatgtttggtgttcatggggggagctatttcctcggcatagtggaaactatcacttttctagcactgagtatcggcttcttcaggcctgctgctggcatactgggagatattatcgttattgttacaggtttagtcacactaagtctgttaccacaactgggaaaagttgacagttttgtcatcaaagatgtgctgctgttaggtgctggtagtgtcctgctgaaatatgatttgaaaaatcatttaaatatcaaaaactgatttttcacttcggtgatgaacgtttgcgtattttcatggaaagagattacctaatccccctcgttctccttcatgttaatacgcaacgttatggaaaacaaaaataccctgagtaaaaaggtccgtaggcaggcgagtacttttattttccgctagttttactttcccatcgaaggccccatacatcactacgcccacgaaacaaccgacgaaataacgcaacttggctggatacaacgtattgccacagatatgcaacaactgcgtcagtccggaatgtcagtcatctccggggatgttggggtctcaggcacactgaccggccccccgtgttgtttccgggtactgtttttgatttatgcaacaaagtatcgcagcgtcgaatatgagctatggccagatttttgttaatcgtggttgttgcaacatgtaaggcgaatgaccacactattctggcacgctcgtaatcacgctgaaattccgcttcctgtgctgccgtgaagagttccgaccaggacatacggcgaagtgtatgtctgtcagtaatatccgtcatgagctctcagcctcctccttcgtatttccgtcagaaacacaaacgccccgcagagaaaattcgccaacattctcctttttaatggcgcgcaatgcatcgcgacaggcccgttcggtatgaaatgcctggctgtgcaccgccagtgtgggctgccgggcatcaccggaagagacattaaagggagatgaaagccagaaaatcagtagccacatgcgtcacacctcgtcctttttatgcgggtatctggccagaatattgagcgcctgtaatggagcttcatgcatttcacggatacaacgggcatcggtgatgttttccctgtaatgcgtggtttccagcatcatatgatgcatatgcagcatccgggccagggctgcgcggagttcttcaatatgttgttcatgggaatactggcggggctgtatccggcagagagggataacctccacatcatccgggtgcgcgcgaagccacgcgtcagtgactgcaatgtcttcagtgtaaaaccatgtgccggatgtcccgttggccagaaaacgcattttccaggcttctggggtggcggttgtgttgttatctttcatggtgccaccactcattcaacaggcttaatgctgtccaggcgcagtctgctcagactgtcgtggctgccacagcggcgtcctgtacttttgctgtagcactcctgccccctgatacaccatgccgttggcgtttcgtagaggctgacacgtcgggttttatctttactggctagaagcccggtgtgagtttttgtctttttcatcggtggggtacaaacgcagaaattttgttgtcatcagtttttgcctgcagaggcctgaaaagacagcgttttcaggccctgttcaggttagtgaatattcttgcctggcctttcggcaatatcaatcccctgaagttgcatggatatcccatgcccattgagcatctggctgtccatggaatggataccgcatgtcatcatcaggttgtaacaaagcgtactcagcatggcgagtgcctcttctgaggatttacaatgtgtgttcataagggccagaaactgctcaacaacatccgggttaatgctggtactgtgtatttcatccttcatgatgtgtccttgttttttattattttgcatttcagaaaataacacgatgcatgtaacccagaaaaccgatatgtgcacgcgtagtcactttctggcagattccggtctctgaaacaaaatacgaggtggcatgaagcggattgtggcggacagggaaagtgatttgattccggggaaggcgctgtgcagcagtcttatccggcagtttaaaggggtggacggagaccaatgaggcactggagcagattcagtgcagaggtgaccttatgagacgacaataactcagtccgcctggcgccgattattctggccggttttgtaacctgagtgtcatttacatgatccaacaggaaatggcgtgacgctcaatacttctcaggtcagttactatatgactcagcgtaagaaaggtataactcagcatatctcggccatgaaggctggtatctcagtccgttctggtcgtcggatcgaaaaaggagagtgggcaaaaaacagtgttcggcactggcgcacacgcaaagatcctctggaagctgtgtgggacangcatgcttgttcctctgttgaaagagaggccggctctgacaccaacaactctgctggagatgctacaggataaatatcccggccagtaccccaacagccttcgaagaacaatgcaacggcgggtccgcgaatggaagctacagtatggtgcagagcaggaggtcatgttccgccagcgacatcagcccggtctgcgaggtctgtcggactttactgaactgaaaggtgtagttgtcaccatcgccggtaagttgttggcgcataagttgtatcacttccgtctggaatggagccactggagctggatgcgggttgtgctgggtggtgagagcttctctgctctggctgaaggtctgcaggaagccctcggacaactgggcggagtgccggtagaacataaaacggacagcctgagggcagcatggaaacaacaggggcgaaagatgggacgccgcgagctgactgagcgttatgctgctctctgtcagcactacggaatgcagggcgtacacaataatgccggtcggggccacgaaaatggctcggttgaaagtgcccacggacatctgaaaaggcgtatctgtcaggcgctgatactgcggggcagtaacgacttcagcaccatagaagaatatcaggccttcatcactcagcaggttatgcggcacaaccgtaacaatcaggatctggtcaaggaagaacgtcttcatctgaaaccgctgccgcttcgtcgcagtgctgactatgatgagctgactgtgagggttagccgcagcagtaccatcaatgtgaagcacgtcgtctacagcgtaccttcccggcttgtaggtcaactgttacgggtccggttatgggacgatcgtctgagctgttacgttggcagcagcgaggtcatgagctgcccacgtgtcagaccagaaaaagggaagacgcgggcccgtcgtatcgacttccgacatgtgatcgacagtctggcaaaaaagcccggtgcgttctgccatgcaacgctgagaaatgacatcctgccagacgatgaatggcggaggctgtggcgtcgcttatgtaatcatctggaacccgacatggcaggcaggctgatggtacatgctctgaaactggctgcaggatacgacgatatctcagtcgtggcaaaaggtatggagcagatgctgaataccccgggaaacgtggatctgcaccggctgatgcgcttcctgggtataaaggaaaaggcgttgccggtagtcaatgtgaaacagcataacctgagcagttatgagcaactactgcgtggcaagggaggttcgcagtgagcaatatccatcaccttgaacgcagcctgcgtaaactacgcctgacacgagttggagctgaatggcacgctctggaaaaacgagcactggcagaaggctggacaccatcgcgctatcttctgacgctatgcaatgaagaactcctgtggcgcgagagtgaaaaactgcgtcgttataaaaaggaggcccggttgccagttgccaaaacgctaagcgaatacgacttcagtcaggtgccggaactgaatggagctcagttccggcaactctgtgaaacgacagactgggttgatgcaggagaaaacgttctgctgttcggagccagcgggttggggaaaagccatctggcggcagcgatcgtggatggcgtagtaggccagggctaccgggcccggttctacagcgcaggagagttgttgcaggaactacgtaaagccagagcgcagttgaaactgaatgagctgctactgaaactggatcgctaccgggtgatagtggtggatgatcttggctatgtcaaacgcgacagcgccgaaacgggagtactgttcgagttaatagcgcatcgctatgaacgtgggagcctggtgataaccagtaaccatccgttcagcatgtggggcagcatcttcgtggatgagactatggcggtggcggcggcagaccggctgatccatcacggatatatgttcgaactgaaaggtgaaagctacaggaaaaagacagcgaaggcagtaacaagcgcgacttgatgtcgcactgaagggtgcggccagtatagttggcgcgagtcggcaaaactagttgacgtctaatagacctgctttatcaaacttaattgtgacaaaatggcgattgagaaggtgcaattgacttatccggattcggtcgtggcgaggtggtgaccctgcattctgctaaccgggttatgagccaggagtcagcgatagacaaagggacttatctgaccgggcccccggaaaaatggcgggagagaatgataccttcctgctgacgagaccggactttgagatgacgagcgatagtgcggcagtgatgtacagcctgatcggtagctgcaaaacttaacggaatcgagccggaaacgtggctacgccacgtgatcagtgtaatcaacacctggcctgccaaccgcatgaaagagttgttgccctggaacgtcactctctctgtaaactaatttttaccccacgtccttcacggtgcgcttacactctggacaagtatgtaaatgataagttaaaaataatccgtgcatttcctgtgacgatattagttgttggtaacgaaatctcattagcggatcggaaatgcacttaacctaatacgttgccactgttccgccaggagttgcagtggcaacgtattctaccgtcagtgatagcgttttgttattatcagaactgatagttcagcgacatccagtaatttcgctcaggtatcacatatcctgttgttgatgatcccgtctggaagtaatcaccggcatacagcgtactcttaccggcactgtacaggctcacgtcactgtaatccttgttgagcaggttattcaccgcagcattcagcgtcagggcatccgtcatcttccacgacagacctgcatccaccaccgtccaggctttcaggtattctcctttctcatcatacactttcttctgtacagcgctcagtgacgaataattctgggtgaaacgtggtgttttcccgcgataacgggcacccagccatgatgccacctcttcggtgatctgccagttcagtttcgcattcaccatgtgttcaggggtataactcagcggcgcacctttgttatcaccatcacgttgttcacttcgggtccaggtgtaattcagtgacagcgtgacatcctctgaccacagcggcaatgtgccggcaaattccacaccatgcaaccgggcctttccgctgtttacatagctattggtgttatcatttatggaataagagacaatcttgttggagaagtcagtcataaaacctgtgacattggcattcagaccggcggggttatcgtaatacaccccagcctcataactgacgctctcttccggcttcaggttggggttaccaagtagatttgtttttccctgcccggatacaccactaatccctttatgtagctgccccattctgggtgccttatatcccgtggtcacaccgcctttcagcgtccaggcatctgccacatcccagaccagatatgcacgcggactgaagtgtcccccgaattgctcatgatgttcatagcggctgcccgcagtcagcgcaagtgcatccgtgagatgccactcatcctcagcaaataccgaccagcttttctgccggaaagtttcacctgtgctggcaaggacaactccgtctttcatggacgagctctgaaactcgccccccaccgtaaccagatgagattctcccagaggggtaagcagtaatgaattcaggataaggttcgattccttaagctcccgcggctgaccggcaagcccccatttgtcgcgcttcagtacactgcgtacgagctcacgacctttattttctgtctcgttccagttcagatacgatttccatgttccgaaggtgaaagtatgatcatagccagctgaaattttgtttcgctcatagcgcagggtccggtcatatccccccgtcagactccccagttgcccatcccggttatcataacgctgccgggtggtatccatatcaaaccagagcacatcctgctccgacgccttccagtcaagacgtgcaccaagattataattctgtgactccgtgggataaggaatacgcgtggctgctgtatcgctcagtgatgtgaccgatgagccctgacgctgttgtgtgctaccgcgtacctgcaggctgacagaatcatccacaaggggaccactgctccagaaattaaactggctgctgttaccccatttgttgctttcctgcagattcagccctgcattgacggaagagagccatttgtctgcattctttctggtaatgatattcaccacaccgcccatcgcatcagagccatacagtgtggacatcggccccctgataacctcaatacgctcaatggcggccagagggggcatgaacccggtattcatggcagaaaaaccgttgggagtcacgtcactgcttccgccctgacgaacaccatcaatcagtatcagcgtgtaactggctggcattcctcggatgctgatttccagcccaccggttttacccgtaccactttcaacatccacaccctctactgatctcagagcctccgccagatcgtggtactggctggactgcaattcctcctggctaatcacagaaacactggcggctgcgttagtcagctttttctcatagccggatgccgagacaatcatcacatcctctgcagcagctatgctgctggctgaaaatccgagacagggaatgactacggaagccagagtggttattcgcatattactaatctccgatcatgttaaccggcaagacaatacacaaatacaaacaataatgagaataatttatatttaccttttacaaaaaataaagattattgacaaaactaaatataaataacgactgcctcggcatgccagttaacagctatccgtatggcgtgttcggttttgcgaataaaaaatggttactgtagaagcggatttccaccacatgtcaaccatgaatggtcagtggtgcgagacgactgggatgatttggtcgatgacttcttccggcgaatactgatagaaacattgaaatattgtaagagaaagcgttcaaaattctgtggcacgtgaaaaattctacagcgtcatcaccttattcagtcgaccttcaaaataaacgtttaacagagacaatcaccatttggattgtccgctgaggaggcgaacgatttcctagacagctttatcatgtcagcccacattgttggcgctgacaatggatttgcccctatatttccagacatctgttatcacttaacccattacaggcccgctgccgcagatattcccgtggcgagcgataacccaacgcactatgcggatgccattcgttataatgctcgaacgcctctgcaaggttctttgctgccgttaacccgtctggtttgggtatgatacttatgtagtcacgctttatcgttttcacgaagctctctgctatgccgttactctccggactccgcaccgccgtgttcttcggttcaagtcccaacatccgggcgaactggcgtgtttcattagcccggtagcatgaaccattatccgtcagccactctactggagacgccggaagctcgttgccgaagcggcgttccaccgctcccagcatgacgtcctgtactgtttcactgtcgaagccgcccgtagtgaccgcccagtgcagtgcctcacggtcacagcagtccagcgcgaacgtgactcgcagtttttctccgttatcacagcggaactcgaacccgtcagagcaccatcgctgattgctttctttcacggccactttgccagtatgtgcccgtttcgatggcggtacagcggtttttcgctcaagcaacagcgcattctggcgcatgatccggtaaacacgtttggcattgatcgcaggcataccatcaagttcggcctgtctgcgaagcagcgcccatacccgacgataaccatacgtgggcagctctccgataacatggtatatacggagaagcacatccgtatcatcagtgtgacgactgcggcggccatccatccagtcatcggttcgtctgagaatgacgtgcaactgcgcacgcgacacccggagacaacggctgactaagcttactccccatccccgggcaataagggcacgtgcgctatccacttttttgcacgcccatattcaacggcttctttaaggagttcattttccatcgttttttaccgagcaggcgctggagttctttaatctgcttcatggcagcagcaagttcagaggcaggaacgacctgttctcctgcggccacagcactaagacttccctcctggtattgcttgcgccagagaaataactggctggctgccacaccatgttgccgggcaacaagggagaccgtcattcccggttcaaagctctgctgaacaatagcgatcttttcctgtgtagtacgccgtctgcgtttctccggtcctaagacatcaatcatctgttctccaatgactagtctaaaaactagtattaagactatcacttatttaagtgatactggttgtctggagattcagggggccagtctagtgatattctcaccacaacataaaacaacaagaaaacaaagcgtaccttctctcctgagtttaatctggaatgcgcccaacttatcgttgataaaggttactcataccgggaagctactgaagctatgaatgttggtttctctactctggaggcatgggtatgtcagctcagacgggaacgtcaggagatcacgccttctgcagcaccattcacatcagagcagcaatgtattcgtgagctggaaaagcaggtgcgtgtaagcgtcaacggagcaccgtattgacgcttatttattagtgagtactacgttccatggcaggagttcgtcaactcggttggaaggccattccggcagtacgctcaggatatggcgcagatacgcttccggatcgataccattcaaccggcaggtgccgatcagcccgtacaacagtgcaccacgctcgccgccgtgatcgctaccgaagaacacgaatttttctttccgagacagactgcacgaagcgctctttccgctgtgttattgtccgcctccgccagaccgtcatcacagaagttgcacaacgcaacccagtgcttcctgatataccggaacgcatctctcagacggcattttttcgataacgtgtgttctttctcctgcatcagcttatacagggaagtcagtagcggtttactctgcatttgcctgaccgccaggcgttcagacaccggcaacccgcgtatttcgtgctcaatggcgtacagttcgccgattagtttcagtgcttcttccgccgtcgcgcttttagtactgatatatacatcgtggattttgcgccgcgcatgagcccagcatcctgcttccgtcaacgcgccgccttcacgttcggcactgaacagccgatcgtaacctgcgaacgcatctgcctgcaggataccccggaagggacgaaggtgttgctccggatgtttaccctgatggtccggtgagtaggcgaaccagaccgccggaggttctggcgaaccggcattccggtcatcccggacatacgtccagatatatcctgttttcgccttcttcctgcccggtgccagtacttttactggtgtgtcatcagtgtgaaccttgcgggtgttcatcacataactgtacagggcatcattcagcggagtcattaactggcagcacgcatcaacccagttggagagtaaggcacggctcagttcgacaccctggcgggcaaagatttcactctgacgatacagtggcaggtgttcwgcagtattttccctgttaacacgcgggcaagtaacccctgggccctgctgataccacgctctatcggacgggatggtgccggtgcttcaacgatgcagtcacattttgtacaggctttttttacccgttctgtgcggatcactttcagggcgctgctcaccagttccagttgttctgcgctgacttcccccagataatccagctcaccgccacactccgggcaacagctttcttcaggctccaggcggtatatttcacgggggagatatgccggtaacggacgacgatggcgtgactgtcgcaactggcggggaaccagcgggtcatcctcacgcccactgtaacgatcgctttcctgctcgcgttgtttcagcagggcttcagcctgttcaacctcacgacgcagtttttcagaacgggttccgaacagcatccggcgcagtttttctatctgagcccgcagatgctctatttcccgttcatcttcttcgatcttttcttcggcacgtgccagtgcagagcgcaggaaggcctccgtctcttcaaccagactcagttgctggtctttctgacggagggcttcagcctgctcagagagcagcctttccagctcagcgatgcgaatgaggtatttctgactcatggccgtttttataatgcggtcaggagttttttacaacattgtcagtgcgttaaggcgggatgtttttggctgacgccagtccagcttatcgaggagcattgccagttgcgagcgggtaatggatatcttaccgtcacgcaccgcaggccagataaactgaccttcctcaaggcgtttggtgaacaggcacagaccatcagcatcagcccacaggattttaatcgtgtctccccgtcggccacggaagataaacaggtgaccggagaaggggttatcatccagcacatgctgtatctgctcccccagaccgttgaaggatttacgcatatcagtaacgccggcaacgagccagatacgggtacctgatgggagtgaaatcatcgtcccctcccggtcagctcacggatcaacaccgtgagcagctctggtgaaggattttccagcatcattttaccgtaatggaattccacatggcaggaagctgcacaagcaactgataatgcctccggagcaggagcatctgtagcacagcgcggggtgtcgataagttccactggaaccagagtcggagaggccggaaaagattgtgatactgtagggcctacaatagttggaggcattctacgagaaatacgtccttctctttgccagaggcgtagccatttaaaaatcaggttgttatcaacgccatgttcccgggccagttgtgcaacattggcatttggtttcgaagccagttcaaccatatgaagtttaaattcattagaaaatatccggcgggttccggagcgccagtctgtaggtttatccatcaatagaactccgtctaatttagaaggagctctaatttagtctgcaaggagcaggtgttacagacggcattggctttacgcttaccaggtgtccactagttgatgaaaaggtgggcacctacgttaccaatactggcttaatggctacatacggcggtcagtttacgcttacgacaatcctgataatacgcttatgaacattacaacacgctcatgcggaacctggatgggggaaggaacggtgaagctgttagcgaatgaccnggcgtttgtataaacgccggtcatgatgaatgatatttcagaatatacctcgggctaaaataccgggacagagatcaggcgtgattaatctgcagcatttttaataacagaagtactgagcttactttacctttgatgatggaatagttatttccgtcggtactcatttttccctgaaataatgtcacggatgtttcttcctgctgatcctgcaggcgcagtcgtaaggtcatatttttaatgagctgagatccgggaggcaaggggtatttgctgtcagatactgggcgactgagtctgatgtggcgcgtatacagcccgttttcgtacagggtggcctctgttatggtgttagtgaccagcatgtgggagacaatgctgtattcttttttaaagcacccaccagaaacggtgattgtaatgataatggtcttctcgatcgagatgtaaatacccgtttcgttatactgtccgtatcggaaccatgagaactcagttgcattccagccatgatccagaatatgtgcatttttttgcctgatagtttctttttttattcgctcatgtttaaggcataacaggcagataaataatgtcagaaaaagaaagctaataatgagagcaagagcgatatagtctgtcacagggtaatacatattctctccggtagaagaagggccgcaaacgcggcccgggctgttatcagaaagagtaacggaagttggcgttgatcgcgttatccacgttgtatttaccaaatgccgatttctcaaactcaagaccgaagcgaagattatcgcgaatttcggcgttgagaccaacattcatgagcatacgaccgtctttttcacctttgatacgtttctcaccggacgcatcacgcagtacggtttcaccgttggcaaacaggtcaaactggtagccaaggccggcgcgggctgtgactttccagtccttaccggagaaggatttacccacatcaacaccggtacgcccaatcagcggattaaagtccttatccttcatggtgaggttcattccctggtccttccaggagaactgtttcccggatacagcaccgtaaacaagttccgcctgcggctcaatccatgcagagtcagttacatggtaacggtaaccgacttccgcaccggcataccaggagtgggagctgtagtctctggtgccaaggccggcgaaagttgcggtatactcgttgtcatggtgaacgtacttaccgatgaggtcgatatatgctccggactcaaacatggcagaggcatagagaccggcacccacagacttcgtttcaccactgaaggcatcactgcctgcatggctgtcggtataggtcatggtcaccccggtgaagaggtcaaggccatcgagttcatgtttgttatccgcaccgacctgaacgtgggtgtagttgtcactgaatccaccgccggcagacccggttccgctaatgattcgggcccatgcaccggactcaccgttaatgtcacgcagatcacccatacgtttgttaaggttgttgacctcagcaaggaaggctttatagccgcctgacatcagtaatgttgcctttttagccgcatcggcgttggccacagatttatagccgatcagagtccatgttgctttgtctgtatcgttcttttgctcgataaccggtgttacatcactgaagccaatactccgagtcgtagctttaaagacatctactgcagttccttttggtgcgctgaccagatcgatattcagtccgttgctgtttccatttttctcaatgaagtcgactaacagaaggttgtttttaccagacaacgatttattgacaacaagctgatctgcttgggccagatttgcacgcagcacaaatgcactgtcatctatagtaaggttgttcactgtaagggttgtaaacttcccattatcaccagtaaaacgcaccatactgtcttttgtttctagacgattaattgatgactggctatttagatgccagatcgcattattcatgctaactgtagctttgggggctgttattgcgcctcgataagcggtatcaaagccatacaaaagagtctctgcccatgcctgataagcagacgatatagtcggtgtttcagtttcaggctgtcccagagtaatggttgctgcatcatcagcataaatatttccggtgacagatgccatatttctggcaatgaaatttgcatttccaccactcagcctgaatccatcagcagcgtagtggagacccggcgttacagttttactattctgttcagggattcccatcatagtcagttcaccggagatatcaataccttttgttgtgaacatggaattttgtgctataacttttgctcctttatctatacttataggagtattatccagaaaggttgcaccattaagtgtaactacagcttgatcacctatggctatttggctgttatgtgcagtgatgccacctgtaaatttagtttctcctatggatagattagtactgatagtttgtttgaagtcaaaaccattattagtaatatttttccctgcaagattatcaatgtaaacatttttatcgccgattgtgatagctgatttatttgctgatatatttccttcaacattggcattgcgtgatattgaaaagtcagcattgttcaggtgtaatgtatcaaatttaaacaccccggttttccagtcaggctgatcaaatgaggtctgctgattattacttttgtaatcagaattgaattttttattatatgaactctctgtttctttcaaaacggtgacccagtccgttccacaaagaaataccagggagcaatgattcgctgagcttctgaatattgcatgctctgttgcatggccttgcatggtaagactggcattactgacttcaacatcattttttgtgttgacactaccatccagaattaattttgcattagttttcttatcctgagaattaatattgtgcgttagttttatattgccatttatgttcccatgatatatgtaggagtcttcgttattgattgccagaacggcttctttcgttgtatctgagttagttattgttgttccatcgtcagtggcggcaattctagtaaaagtctgattgtgtccatttaaatctagcgtaccaccacgtttagtaaaaaatatccccgcatattgatcattgccaagggaattatctttatttagtattaccttaccatttccgcttgcaaggtatatattgttaaatgttccttcttcattaagaataacatttccttcacctatctttatatttgccccctgttttttttgaacattcagagtaccggggcctattttgtgtaaaacatcatcactggaatacaatgcattccagtttacaatgctttcttttccgatatcaattcctgctcctttaaatgtaaatccctgaccgtttatgttatattcatggccttcgtcaaagataataccaccgctaccaaaatccaaattatccttaaacaggacatctcccccatttgtgaacacaatatctttgtctttagttattttttcttgagtaccagtggtatctgcattgttttggtgtaatgttatatctgtgtttttaatggttacattattgccattcagatttattttatgactataggtatcttttaactcactaaccagtttatcattgtattttgttatccatgtcagttggtcaccattaacgctggcaataccatgggttgttccgactaatacccatttttctagtttgttatcatataagtatgctccagagccgctgtctccgaatatttcaagattacgaaatgttttatcatttttataaatcatcatgccgtatgagtcccattgggtgacctcaaatagactagcacttaacagatcatggctatatgctgaatttgttgagattttggattcaccattaataaatgatgttcctccagagccagcacgaaaacctatgattttttttgaaccgtcagaagtgactataccgtagcgttctaatgcatcagaatatgttgtagggttggtctctgccggggtggcacctactgtttccacaacaaatttatttaacctctgaatctcaaaatcattggaatttcttctgtcaacaaccctgtaagaagactgagcgtaaacctgggtttctgcggcctgagggttctttttgttatgtgcaacagtaacactataagaacctcctattgcggtagctgcgccactcgctgctgcaccagaaaaatccggaattgagagattatggaaagagaatttatctccgttttttaaagtgattgttacgtctgttgctccgggctggaaaatacctttattttgtgcaagatcaagatagtctctcgcccatacatttgatatatcaatatttgctgcatttactgtaccggcaacagccagagacaacattgttgctacaagttttcggtttgttttaccagaaactcttttcgctaattcagaaacagcaatgagtccgccagtggcagcactatatttaagggagtatattttattcatatattctctcaactcatttattgaatgaacaaagtattaagaattaaaattattagtaacggttggttactaacagcttgctaaaagtaacagttctatattgtaaatatgtgacaatgttctcattaatgatgagagattatgtgaatcaatactaattgatcgttaattgatcgttttttgtttttttttgcccaatgtggggaggagtaatgtttaatatttcgatatgatcgaatatctgttcgcatggaacatcgttcagtgattcacgacgaattagcgatcgaccacgatgcgattttgcagtgtgccgaagaagttctccatcgctgcgttattcagaccgtttcctttgtgcggcatattttgtgctactccatggggctttaactttgcctatagcctgccattcgatattgccaaccctgatccgtatgtagctacggggcatcctccgggccgggcactgacaatgcatcgtgcaccatcgtattaacaatctccattaccggactttatgacaggcgcaggagaaaatctcccggttaaactgaacggagaaccagcgacaggtacctctttttaccctgtagcaagtactctataacatactcccccatttttcgttggccttcattgcagcaaagttccgactcaggatattgggcgcagatcatcctctcaggaatttcaggatctgccagacggtgctgagacgacgcttacttgtaaggttagttttcagacggacaatgaaatgaggatatgcgataaatttcagtcaaagatccataaaacagacataatgttattcagtggtgaacagtccattccggagacggaatatcttgttaaggctgtatattatactggctgtaaacaacatggccaccaaggaccatgttgtttacagcatacccttgttgcaaaagcatccacgtcagaacagcactgagtagttcagaccaaaggttcggccccggcctttgtagtcgtacagtgaagcagggccgtaacccgggctgtagtacagaggtgcacgctgtccccagacagtggtatagtcacggtcgaagaggttctcaacgctgaagctgagtgttcccaccggaagctgccaactactgataaaatcgacggtagtgtaaccattaatatcgttaccctctgcatcgcttacgtcgaaagaagtggtgctctgtacacgcagactccacggttccggcgcccagttaatgtaagctgtcgctttcgatggacttgattccttcacgtcatatttttgccattgaccgttcactttcgactcggttttcagcacattgaagttcacaccggtactccagtcagtatccgggatcaggtagtccaccgcaccttccacgccgtaaatacggcgcctgtcgtccttcacactgatggtcagatctttattcctttccacgctcttattggaaagcgagtaatatgccgcgatttgagtccgcaggttgtcaccggtaaagcgccagcccagttcataagaatcgactttcacgccttccagcttactgtcgctgacgttcacgctctttgtcaggggaagatggccgttcactgctgcaccatagatgccgcgaccataatatttccccggatccggcaatgccaccccctgggaaaaattgaaccatgcctgctgacgttcggtgatgtgcatcagcagaccagcattgaacagaaagttatcgtaatctaccgaaccaccaggaatggcgtcggcagatatcgccttcccggcagcaatcttctgttgctgcgtgtagtcgatgaaatcatctaccctgttctcagtatactgatagcgtacgccaccgctaacggtaaaaatatcattaatgtcatagctggattgcaggaaggccgccagattggtgatgtcatatgacggatagcgcccggtggtgtaaatcttatggttgttcagccctccggaagcacttgcctgagccagatcgaagaacatctggttggaggtaaagcgctcatgctcagcatccagcccccaggtgatttgccagccgtccataagttggctgttcagagtcagtttcatgccgtactggtcggtatcctgctgtgacgaggagaaagccgtcgcctgtttattcgcatttaccgtcgggaacgggtagaaccgcaacgactcatcgcggtagtaaacctgaccgaccagttcctgtctcaggaaatcactgtcagagtactgcaggctgatcaaatgccgctcagtgccgggaatgcggtcagaattcagccccttactgacgtatggtgtgctgctcccgctgatggcggaaaagcctttcccgagattaagcccgtaattgtcgtccccctgacttttatagtactgcgttatcagttgaagctgccgggattcatcgatgttcagcgtaccggttcccatgatgtccagccgattggagtgctgcaggccggtctgggtgttatcaagcagggtggcatcgccgttaccgtcaaaccagccgccaaatttctgatatgccacggaaagacgtccggagatatggtcatttccgccggagacagcaccggcaatgcgctcatcgtgatctttactgctgttaaagccactttttgtgccagcctcaaactccatcatggtttccggctggccttttttggtcacgatgttgatcaaccctccggtactcccgccaccgtacagggccgtcgcgccggagatcacttcaatatggtcgatattaaaaggatcgacagagtccagttgtcggctgtcggaacgtgaagagttgaggcgcacaccgtcaatcaggacaaccagcgggcggccacgcatgttcataccgtagttggttcggctctggctgctgacatcaaggccggggattaactgagccagtgcgtctttcagctctttaccgccctgaatctgctgctccagttcggcattttcgataacccaggtggtttgcgccatctccgctacagttcgattgctgcggctggcagacactatgatctcattatcatcgttttgctgggcgacagctggtgacagcacgacaagaagcagcggaccaagagcccggggcatatactttttgcgcatcatcgttattcctgaatatttgttgtatagtgagttaaagcagcagcctccggctgcggttttttccggctgccgctgcgccactgaatcagtgcgggcggcatactgagatcgaataaatcacgccccagtacgcgattaagaatacgtgcagatctccaggccatcaggctgagctggggttcggcgatgccatgagtttgcatgctggcgttgaccgcaaagatgttattttctttcgggccactccattccagagtgaagtcatcacgcactttaaaggtgttcttatcgtgcatggtgatcaagggcatcagtgagggaagtatttgtggcaatgcagaacggtaacctgtggcgaaaatcaccacatcactttccaggctctctctgccccgatccagatgatgttccatcaataacttccagcccggaccactactttccagagttgttaccgagcggctgggtagcagacggatatttcttggttttctcagaacttcaaaacggtggtacaactcacgataaatggtcagtaaagaatcggcagtgatgccatccgatgtcattttctgctcatccagtaactgatggcgaatatcttccttcagtccggagaagcctgaaatatattcaggtgtaaaatactcatcagcaaaagcagcctcatccagtgcgttaaaattattacgccgtgagacccagtttatttccgccgcttctccccattccccgcgtaatgcattaaggaacaggtctgcaccactctgtcctccaccaaccacagttatccgttttccactcaggtccggccgacgaagattcatttcactggcatggaaacaggattgtgtcacatgcttcacacagggtggtaaataaggttgttttcctgtaccaaggcagatattgcgggcaaaatattctccccgactggtctgaaccagaaacaatcgactttttttgtcgaaatcaatattttcaacggtatgactgaaatacaggttattcatatcttcagcagcccagcggagatagtcagaaaactcttcacgggatactgtacgtagtctgcttgtaaggaagcgatagaactttttgtgcttcaccagatagttaacaaagctgtagggatttgtaggtgcaactgcactgaccagatctttcagaaagacagtctgcatatgacaatccggtaccagcatacccggatgccaggaaaaatgaggatgttcgtcaaagaagagacagttcagttcttcgatctgatgtgacaatgcagcaatactgagattaaatggccctgtcccgacaccaataaaatcgacactttttttcatgattcatattcctgagttaccagccacagcggattttgcagattctcaaggtaattcggcagcatgcgactgccgccatcctggtccggccaggtcagttttaccgggttcagcaccacgcgaatgatttgtggcctgaagagtgagaaaagcgcaaaacgctctgacatttgtggatgtttgttcatgtaatcactcaacactgctgccagcagttgataaaatcgcctttcaggtacgccaagacgaaccatcagtggcgaaataaaacgcagtactgtcacgaagtgacccgtctgcaaatcatggattaagtagtccgcactcagacgggatgtgacatcacgcacctcctgaggcaaagagtccatttcgggaaacgcttctttcaccagccgcatatcgccctggaagtctttcagcagaacacgctgtggtaccccctctttcatggcgagcgttatattttgtccgtgtgcaataagcgcgacaccgtagcggcaaagcaggtgatacagcggaaccacaaccacccggaacaattgcgtaagccaggtttcagcgtccagtccggagcggtcgatatatgcgcctgccagcggctgattgttttcgtcgcactccatcagtgttgccatcagaaccggactttcatccggtttcagccagcggcacggattctcccgccagataacaccaagcatttcctggtagcgatagggagcccgggcaagcgcggcatagccttcatgggacacatagcctgcagccggttcaccaaggatcactgcgccgctttgcaccagggtggcgtcggtcgcaaaaacctgttgcagccagcgtgaagccagtggtccggcagcgatatatctgccagggatcccccggtagcatgaggtgttgtagatggtcagcggcagcttgatatccagccctccccggcggctggcgttggtcagggtacgcagcgactgctgggcgagccactggtcgccaaactcgccgagagacaccatcctgccttcggcaaaatcagcgatgaagtcggtggcgattttttgctgccactgccacggatgtaccggcagcggcagccagttgtgatccagcccgttttcctgccagacctgactgaagcgtgtaaactcctgcggatccattgcggcagtcaacaactgctgaatatccagatcgttgtcgcagcgccagatcatatgttcacgttttaccgccagccagtgcagtctgaaggtgttggcatactctggcgcatatcgttccagcgcctctttgccccagccacggcgacctttattaaaaacgaatttaggatgaccgctcagcaggcattgcagacgatcggcatcaagattaatcaggtcactggcactcagtccgcgacgggccttcagcagttgcaggtcgcccagtagcgtggcatacaaatcctgcatatgctctgcaacagtggcatcactcattgacagcaccggctttagctgcatcagcagcgtctgcgccagtactggttcgtccgtgcagcgcaacgtttgggcatcaatccacagccagccccagataccacgttcagcgataaagcgccattgtgctcccggcaggttaatgcagtagtggtcatcgccctgagattccgcgtggaaaacctgctcatactccatctcagacaacatttttgccaccagccgacggttaacaaaatcccagtccttgtgattcattacagaccgacctccgtgaagaagtgatgacgatccgccatcaccatgcgcgagcgcttatgtgggaagtcgaactctttaattgtccggtatcccgcaggctcaagatggcggaacaggcgctggttatcggtgcgtggctccagtactgtgcgctgcgtacggggctcatccagcagcaggtaatgtgtcagcccgcgcagccagctttgcacatagtgggccccgcgccattgctgttcaccaaccagcagatgcaggccacggtcaaagggctgccacgaatagtgacgaccaatgcggtcttccgccgcccagtagatttcaaaatagctgaatggccgatcgtcgaagcacccaatcagcgggaatgcatgtttaccggtgagctggcgctccagataggcggtctgtacctccagtgagccactttgctcccagaaatactcaacgcgcggatcattcatccagcgggtgaaacgttctgcatcagaaacgggatcggcaatgcggaaactcagcatcctgcgaatacgtgggtcgtaacggcggtaaacctcaccctgcggacggggtgggcgctgcgggaaataaatctcacgctctgcatcaaaaaccatttcaccggaggcccggtttgccggtgaactcaaccataacggtaactgccagaaggcggtacgatggataatgtcgctttttacctgcccaaaaagcgtcagcgcctgtggctcctcacaccattcggcccaggggagagccactgctgacagttgtggtgcggcgataaatatctgatccagcgcatcgcacagccaccctgtcggcagctccccgggacagtgcaacaccgcgctattgtccagtccccagccaagattcaggggcttgtcgagtttttcacagcgcagtccatatctgctgtgaataatgtttgcctcagacattcagacctcctgagcctgcagcgggttagcgaaatcgaaatagatcaccgaagggtcaacaatggtgttctcgttatgatcgttcagataacagaaaaagttaccttttacgttccagtacggactttccagcacgtagttgagacaggttttatgagtcacctgatcacgcacttcagccagcgatgctcgtacacgagccatcagattcgattcgctgtccagcccggcagcccccagcgcagcggtcacagcaaaagtggagttaaccagcaggtaataagggaaatagcgcagcaactgctcatgggtgaaaatattttccgcctgcgcctcgccaatagaatcgagccagtctgtcgcgtgaggcataaaagcgctgccctgacagtcacggtaaataaatccgaccggcagatccccaagcatctggacaagaatattttgctgatgcgccagcagcaccaggccgtaatccgcttcagccgtaaacagcggctttagcacttgctgacagtatgcatcgacccatgcatgggcggcctgttgcacagtgataccgaggcgatcgctcaggcgttttaccgccgaaaccagcagcgaatcaccgccatcaggtgcggcctgagtcagggagaccagtacgttggtctggcttttcggctgatccaccagcagattttcacgcagggcaaacagactttcctgcatgatgttgccgttaagatcgagcagcccggcccagccatcctcctgcattacccggaaagtcgggaagcggacctgtagcatctgccagccgtcggtttgagccaggcgtgccaggcgcatcccacgcttcacttctttcacggacagagtacggatggagttggtcagccgtacgctcagggagaacttgatcatatcgcggctggtggcacagtagagggaacgggaagaggtggtcggcagccacgacgtgccggcctcacctaagtctttaatcagccctttagcaacaagtgcctggcaccacccctgctgcaaaagatattccccctgccacgggtgcaacgggaacagccattggttgtcacttaattcgttgagtaactgaggcgcattctctgcggcaaatcgcgtcagccgctgttgaaggttgagatgcaaactttcaccggcgatttgcgttttatccaccgaaaaccaccgcagtgggaagtggggtgccatatcaggcaggtagcgttcagcctcccgccggttaaacggttcatgagacttaggcgcagggtggaaagcgtgtcctgtcagcagcgcctgctcagcttcgccaaaattcaacgctttttcacgcagggcggtccagtcatgacgggcatcaattgcctgttgcgtatgggcgtggctttccagcacgcgctggtggaaagtttcgcagaggggaacgggcagaaacagttgatgccgtagcttatcaataataagccgggagagagtggtaaagtcgacaggataactgcctgatgccgtgaccagacgtgcaggaaatgcaaagcggtgatgctgggttggggagaaataagccactctgaaatggagcgatttctgctcatccagcgggatgatcaattcgtctggcgggtattctgtcagtttccagtctgtggtttcacgaatcagtgcattcaggaagcactgcgcagccacatctgtggctggtttttcagagggcagggtcatagtcaaacagctcccacacagtaaaataataacaattatgtcaataatgattctcattatcaataagaaatgttattgtcagataaattaattttacaaataaacacaattaatacatggagttgaaacattaaaatgtcacctgggatcgaagatacgccccaaaaaccactgtcctgctggccacttgcgttcagtgccgggcttctcggtatcgggcagaacggtctgctggttgtgctccctgttctggtcatacagacaaatctgagtctgtctgtatgggctgccctgctgatgcttggctcaatgctgtttctgccatcgtccccgtggtggggaaagcaaatttcccgtactggcagtaaacctgtggtgttgtgggctctgggaggatatggcataagctttaccctgctagggctgggaagcgtgctgatggctaccagcgccataacaacagcggtgggactgggaatattaatcatcgcccggatcgcctacgggctgaccgtgtcggcaatggtgccagcctgtcaggtctgggcattgcagagagcaggagaagggaatcgcatggccgctctggcaaccatcagctccggcctgagttgcggcaggctattcgggccgctgtgcgcggcagcaatgctggccattcatcctctggcgccactggggctgctgatggcagccccagtgctggcgctgctgatgctgctgcggttgcccggcacaccaccacagcccacaccggagtacaagagcgtcagtctgaacgcgggattgtctgccttatctgctttgcgcaatattactggctgcggcggtgagcatgatgcagcttggactttcgcctgcccttactcgccagttcgccacggataccaccgccattagccaacaggtggcctggctgttgggtctgtccgcagtagctgcgcttatcgcgcagttcggggtactccgtccgcagcgcctgactccggtggccctgctcctgagtgccggagtgttgatgagtggtggtctggctatcatgctctccgaacagctatggttgttttacccgggctgtgcagtgctgtcatttggagcagctctggcaacacccgcttatcaacttctactgaatgataagctggctgatggcgcaggcgcgggctggctcgctaccagtcacacacttggctatggactgtgcgctttgctggtgccgctggtatcgaaaacaggtgtcgcaatcgcgctgattatggcagcattatttgcaactatattatttaccattgtgtctgtatttatctggcattaccgtactatcaaataaagatatgatcatcaccttactggagtaaatcagaggatatgagagaggacctgcgtctgatgaaagcatgtcaggcagtgttctggcttgctgcccccgccactccgtcatgtctctcagagaatcatgtcagagctgtagatatatcctgaacttgtttacaaataatttcttattttttgcgcataacattcagcaataactccccttctggccattgaattaaaatgtgtacttctctgtgacgttgtccagcttaattctgtcctccatgatgaccccagatacccgacagataaatcatcggcatcttcttctggctcattagttaattcatgtcggttactatcctgaaagctgagaaaatgtatttcatcatcagtccgttgtctgtaatgtccatatataaaatcatattctttttgataagattccttccagtaccaggttgtatcaccacacaaccatggaactctttctgacgaattaccaacacactgagatgagtattcagataactcagacctgaaagaagttaccatctgataaaacaagtcaggatgcttttcataatctggtgacataagatcaaactccccctgcatccagcagacagatagcagtttattctttctgttatattccagagctaccttaacccgggctactaagtcctcatagagtgctgttccggtgccccaccgcattgcatcagctgttgcccctgtatcaggtacatacataccttcagctccaacagtaaaggcggcacctcctctgcaacaaggaaccagtaatatccctgcttgctcaggtatgtatggcagtaactttttagctatatgcaatccctgtccgacacaaccatattcccctttatgcaaatcagcagccggatggtgatatccactcatatcctgaacatcatgcaggcagtgatctgccggaataatctcattgaatttacactcttttcctcctggtgtgattgtttttcgacgagccagttgttttacacgggactcgggtttgtcgagtgtatctggcaggggaataccttcaccgtaggccataccattagactgtcctgcgagggctatcacataccagaaacctattttttcattaaaatcatgatgatacatcattccccctttacataatagatttaattaaatattttcattattaaaagaaagtgttaaattaaaaactcatttgctctaatccatataaatcaatatatgtccgacacaaaaaaaccgtgttacccgggcttacaaccgccagaagcccattggtacaaaaaactttcagaaatcgtgccgaaagcttgaagaatgatccgccagaggagataagggaggggaatcctgccttctgaacgtgaactatggcattctttggcgttggaagaccatctgtcagagaggctttatcatcttttagacataaagggctaatccggtataacaggggagaaaaagccagtgtctgccgccatcaccagaaaccatcattaatgggttatcaggcattgttaaagattttttatctacagctgatggcatcaaggattttgaaagactacgcatcttttttgaaaccaaccttgtaagatatgcagcaaaaaatgcaacgcctgaggatattcacaggcttgagaaggtgctcagtatccatcataactcactgagaacccccgaagtgtatgctcaatatgatattgaatttcatagtatacttgctgatatacctgacaataaagtattaaaaacaatacactcagcattttctgaatggctgataatggccaaacctctggaaaagaataaaatgacatatgaaaataacaaaaaaacccatcagcagcatattgaaatacttacggccataaaagagcatgattgtgataaagctgaacagctaatgtataatcacctttataaacgaattgaagcatcatagttactcgacgcttcaccaggtagtcaccataaatattatttaaatccatgagaatacatccagtccataaacagttttatccatcctccaacaggaagatctgtggcccactgaatactaaaaccatgccctcctttctcatagagatgcatttcagcagaaacacctttctctattaggccacggtacatgagcagactgttttcaattgacacaagatcatcatcacaacaatggagtaaaaacacaggaggaaaacatgatgtgacattaagatccgcactatattgtattatattttctgaggtactattgtcccccagtaattgcttcctggagcctggatgtgtcacatcatctttcattgatattacaggataaattancccgacaaaatcggggaatagcgaaaatctcttgttctttactgtcagaagmacgtttsaaatcacmaatctgattccccammcgttgaggcgatatgccccccagcagaaaatcctaatacaccaatacggatgacgctgtagatgccatttatcagcattcttacgaatataaagcattgcagatattgcatcaataaaagttttgtttatattttctccctcaactggcgatggtaatctgtaactaagaacaaataatgtatagccctgagataaaaactctggagcaagagctgtaccttccttatctaacataacagcctggtagccccccccgggaataatcaatattcctgttccatttggtttatctggtaaaaaaataattaactgaggagcataaatatctgtcaatacacgatcaagttcaaattccccgttatgttcaggatcctgataaatacggcctgaaagagatttactctcagatattgtctcacttgacaagtcaacaatagttgatttattaaacaagcttaacatcatttcatttaaagatctatctttattcattataaaccccattaaaataactcaggtgactgaacaactaatacagtcacctgcattacagttatttaacaatctttatttgtttgtcattttttttcagataaataacatctgaaacagctttaccatcttttttctccccccccagaatgagcatccccccctgccagggcaggcttacaccataagcaagtccttccggcaaagaaccaacttttttccagtcattttttattagctgatatatctcttttgaataggctttatccagtcctttatgagaccagtattcaccattgctatacttttctgccgctcccgggaaatatgcaccaccggccagaaagatatttccatcaataacagaggcatatgctcctgacaccccctcgggtgaagctactggtggaagttcagaccatttaattcgatcatgcgaaagctcccccgtccaggatctaacagaacgaagccccggttttctctcccctcccagtatataaatttgctgttctgcaaaaatcaccgatgaaccagcagttcccggaaatggagtcgttcccaggttcttccactggttttttgacgggtcataagaaattatatgattatttaaaaaataatcatcagcaggtttactaaaataatccctgttgactttctctgtcagcgcggaattcccttttgataactcgacatctgaaaagtatccattaaaaatattctcatttacaccaccagtagataccgcatgaccattatggataaaagaaacatgaccggcaagagatacagggggacgggtcatcaatttttcccatttatctttagcaatatcataggaatagacatctttttgtaaggttatgactccacttgtatcttttccaattcctccaaatacatagatcttaccatcaataatagtagctgttgcctgctctctgggaactgtcggccattgcgctatcttagtccattttttttcactctggtttgtatctatcatataccagttatttcccagacttcccagtcctatatatattttaccattctcgatccctcctacaccatatttaaatggttcaggaatttccggtaaagctccggctaccgacgttccaataaacaagcagaagggaagatatataaagtttttcactttcattgtaatcaccttttaaaaattaatcagaacaccgacacggtaactattttcatgtttattatctttccccttatacaccccttgtttatccaagtaatcatattctatatatggggtgaacaccggtgacattttatattgcagaacaaatgcattttcagttgcwgtttttttatgattcccatatttgaaattattaaccttcgtatataccgtggtctgccatgcaaacaaccatgaatcattaattttgtatgtcacataaccatcaaactgatgctgatcattacgcgccctgttgccatctaaatccgtctgtcggaaagctttccagtcatagcgatagcgtaaggccagattaagatctggcgttgcctgatacgaaattttcagataagggttatactgacttcctgctgacatccattgtgtctgaatccctgggattagagcccatttgtcatctattttatatgttttatttatatctattttattataattgagtgcaaacaattcattttcattgttgtgaattgtattccaggtgtttgactcaaaacttgcccaccaaccattattccacccctgactaacctgaatcaacgtttcataagcgtgactggcgcttctgtatcccccacgtagattaagagttaatgcctgagagcacaaaggtaaaccaagaagaattacagttaatagtggataatattttttcataaatgcctcatcattaaatatatttatcacgttgtaatttgatttctcaataaaacttatgttccgcaagccattccagaagcaggctttgccatttttctatcggatatccattttttccggatacaccaaatccatgacctcccttatcaaaaaaatgagcttctgcatgatgtcccttatcccgaatagagttaaaatatctcagagaatgaataactggaacatccttatcatctgttgcatgcacaataaagactggtggcatatactctgtaacactattttcaagactggctgaatattcactttcacctgcatccagaagacgtttccggcatccctgatgagcaatactcctgtcaagagatataactggatatatcagagccatccagtcaggacgcacagaagtctcttcctcataatggagatgagtaatatatccagcaagatgaccacctgccgaaaaccccatacatccaacactcttaaatgttctctccgacattccggcccagtaagaaataaagttcagggcattcttcgcatctgcaaaggaataataaccattaacggagggcattctgtaagaaagaataaatgccgtatatccctgacctgctatccatctgccaacatcaagtccctctctttcataaacaatcctcctgtatccacctccaggtataatcagcacactatgttgattagatacaacaggctcaacaactgtaataaggggcacaatacctgtatatattatgccatcgccagtattctcaaatagcgaactgtcagttatataacgctcataattatcaagagaatatatattctccctgtaatgaatcatttttttattccctgatagcatccgttattcttctgcaacattcttttttcttgctccataaaaaggttttccatcgacagtatcatattcaagcgcagcttctggatggatccatctctgtacacgtgatggcatatcaaaaccaataaggacaagaacaacaaatgttaagataaaagcaagagaacacattgctgtaccaagacttgtatgagacgcaacaactgcaccaagaataggcgcacatgctccaccaagtgaacctacattataaataaaccccagtcctgccgcacgctgctccacattaaaataaccactgattattttcggcaccagagcaccaatcccctgaccaaaaacctgctgagtaaagattagaaggccaagtaaccatacatagtcccggtccacaagaaaaacggggataataacaagctgaccgataagaagtgatataacatatgcttttcgggttccaagccagtcccccataaaaccacctatacaacttccagctgcagagccaaaacctgccagcataaatatgagagcaacagtttctggtgaatactgcatatcaaccttaagccatgtaggaagaaaagcctgcagtggccatccgtagaggaaacagaacataaccacaagcatcaacataatgcctgttggccatcttttccccataccctgatatataaaactgataaaaacagccgcacagcacaatgccataactgtgattaaagcagcgtttgcagtgacgcctgaaaaacaaacatatagacatgcaaatgcaatacaagacagaagaatatttatgtatttattcttttctctgtacagaatatccaccattgttctgacgggtttattctcttgttgccttttttgccagtcatcagactccggaagattcttgcgaagataaaaagcaaataatattggaagcatgccgacaaagaaaagagaacgccagccccatagtggtactacaatgctataaacctgtgcagctaaacctcccccaatagaaaatccagaaattaaaaaaccacttgccttgtttctgagatgaacaggccagctttcgataacatatgttacacttgagccatattcacctgccataccaagcccaataacaatgcgagcaataaacatcactgcatatccaggagccagaccacaggcaagggttccgagagagaatagcactatacttaaaaccattgccatcctgcgccccatcttgtccgataaagcgccaatagcaagccccccaaaccatcgagaaataaaagcagcggaaataaggcttgccgcttctattgtcgtcaagccgaattcatgctgaacctctgtaagaaccagagatatcagaacgaaatcaaaaccatcaagtaaataacctgtccatgccgcaccgaatatcttccactgtctgggtgaaagatgcttataccaaacctgctttttctgaatacaggagtccatattaaacctcacaataatagcggatttataatacactggagtattactttaagtaatacaatcccggtcccaaagagttgcaccaataagaccagagtcacttctgaaatatgccggaaacagcattacattacaaatttcagaatatatggaaagatgtttcgacactttctgaacatacccatcagcaagtccaacacttcctccgacaacaacaacctgacaatcaagcagtaattttaaacttactattaattcagcaatagtactggcagaacgctctgtcaaaaattctgcttccttatatccctgtctcgctaattcaaaaatatatttggtgctatatcctgcaagtttattttttgctgcccccatgatggcccgaccagatgaaaccgcttcaacgcatccccgacgaccacatccacattctgtatccgttactccggacaatatatgcccaacatgtccggctaatccagaaacacctgttaataattttctgttaactacaattccccctccaacccccgtagaaacggttataaaaaccatatcacaaatttctttcggcaaaactgtatattctgcccatgcggctgcctgggcatcatttatcacacttccatttaaaccagttatatcttccattatatttttcagaggatactctttcagccctccaagattgtctggattcagagctgtcaatactccattattaataatccctgttgatgctactgcaaatcgctccgctgttcccttcatttcagaaaccagtagacgtaaagcccctgtcatttcgtcaggacatctttcatgaggtgttgatatctgttttttcagcaaaaatgaaccgtcatcagatatcaacgccgctgaaattttcgttcctcctatatcaacagccagtgttatcattcattttcacctatataacaatcttgcaattattcagattattttcatttttttgtttctgtcatgttcttcgaacagtcgctctgcaagttttgataatacatccagattcttttcctttaccggagaaaaaggacttctgcatacaggagtatttataatccccatatagtaaagaagagtttttatacctgccaggacaccactctgaataagagtgtcaataacctggttacaggctacttgcatttccttcgccttaatcacatcattgtttttgactgcttcaaatatttcaagataacgccaccccattatattatatgtactaccgattcccccatctgcacctgcaattaaccctgatgcaaatatttcatcgtaaccattatataacacaagctctggatgattccttttgatttgttccatctggaataaatcaccggatgtctgttttaatgcacaaaccctgggtattgtgacaagctcatttatctgatctaaagaaaaacgcactccgctaagagccggtatattataaactaccatcggaagtccatctgcagaatcaataatcttcctgtaatggatacaatgctcttcaaatgaaaaaggataataaaatggagtaacagcagatatagcatgatatccgtatttttttgcagcttttgcaagtacctcgctttctgccgtactgatgccgcccacatgcgctataagtgtcagtcttccatctgattcatcggctactgtttcaagaattttttctcgctctgcaacattctgaagaaatgcttctccagtagagcctccaacatacaatcccttaatattttgttcgatattaaaacggatcagttttcgaagactctccatatcgatttgctgggattggtcataaggagtgggtaatgctgatatgacccctttaaattcacattgcatttttaatcaccttcacttaactgcataatgggatacctagtacaccatcaagtacaaagattatccaacagaaaagaagcacaatgtgaagattatcaaaaaaaaaccatcagaaagctgtcatgccgctcagttaaggatcggttgatcgatccagtgtccagttactattctctgcgtaaccctctgcgactatcttgccccggaactgattacccacagccctgaagagtccgacactgtcacgctacgcaaacggcgtcttcctctggaaatgatggcctggtgaattatcagtatggcccatgagctgtaaggaaccttcaccagattgtgaaccggctggacacatgctgccaggtagtcgcccctttgtcgcgccgtgatccatgcccagcagcggccaggaagcggggccgtacgccacgtgttcacgtaaacagcgcaagcccttgncaaaacaccacngctgtatccgatatggtgcaatatgaaacctngctgtccatcgaatggggtgtntnaactnaacccagnccacgcnagaacccgacataaagnttcnctcgccagatacatggtaagcgtaaamtgaccgccgtatgtagccattaagccagtattggtaacgtaggtgcccaccttttcatcaactagtggacacctgttatggaacagaaaatattatccgcagaaccccgcagaacattttcaaatgagtttaaacttcaaatggttaaactggcttcacaactaggagcctctgttgcccgtattgccagggaacacgatatcaatgataacctcctgttcaaatggctcaggctctggcagaacgaagggcgtatatcgcggcgtcttccggtaacaacctcttctgacgctggcgttgaattattacctgttgagataacgcctgatgagcagaaagagcctatggcggctcttactccgcttttatccactccttcacaaagcacagtcagtgccagttcctgtaaagttgagttccgccacggtaacatgacgctggaaaatccttcaccagagctgctcacggtgttgatccgtgaactgaccgggagggggcgatgatctcgctcccatcagacactcgaatctcgctggttgccggcgttactgatatgcgtaaatccttcaacggtctgggtgaacaggtacaacatgtgctggatgagaaccccttctccggtcacctgttcatcttccgtggccgacggagtgacatgattaaaatcctctgggctgatgctgatggtctgtgcctgttcaccaaacgcctggaggaaggcctgtttatctggcctgcggtgcgtgacggtaaggtatccattacccgctcgcagctggcaatgctcctcgataagctggactggcgtcagccaaaaacatcccgtcttaacgcactgacaatgttgtaaaaatgtcatggccggattataaaaacggtcatgagtcggaaatacctcattcgtatcactgagctggaaaggctgctctctgagcaggctgaagccctccgtcagagagatctgcaactgagtctggttgaagagacggaggccttcctgcgctctgcactggcacgtgccgaagaaaagatcgaagaggaggagcgggaaatagaatatctgagggcccagatagaaaaactgcgccggatgctgttcggtacccgttctgaaaaactgcagcgtgaggttgaacaggctgaggcccaactgaaacaacgcgaacaggaaagcgatcgttacagtgggcgtgaggatgacccgcaggttccccgccagttgcgacagtcacgtcatcgtcgtccgttaccagcacatcttccccgtgaaatacaccgcctggagcctgaagaaagttgttgcccggagtgtggcagtgagctggattatctgggtgaagtcagtgctgagcagctggaactggtgagtagcgccctgaaagtgatccgcactgttcgggtaaaaaaagcctgtacaaaatgtgactgtatagttgaagcgccagcgccgtcccgcccgatagcgcgcggcatcgcgggctccggattacttgcccgcgtgttaacgggaaaatactgcgaacacctgccactgtatcgtcagagtgaaatctttgcccgacagggtgccgaactgagccgtgcattaatctccaactgggttgacgcgtgctgccagttaatgactccgctgaatgatgccctgtaccgttacgtgatgaacacccgcaaggttcacactgacgacacaccggtaaaagtgctgacaccgggcagaaaaaaggcaaaaacaggacgcatctggacgtatgtccgggatgaccggaatgcgggctcatcagagccaccggcggtctggttcgcctactcaccagacaggcagggaaaacatccggtacaacaccttcgtcccttccggggtatcctgcaggcggatgcattcagcggttacgatcggctgttcagtgccaaacgtgaaggtggtgcacagacagaagttgcgtgctgggtccatgcccggcgaaaaatacacgatgtatgaacgacatctcttctgacgacattttcctgctgaaacagcgcctggccgaacaggaagcgctgatccacgccctgcaggaaaagctgagcaaccgggagcgcgaaatagaccatctgcaggcgcagctggataaactccgccggatgaacttcggcagtcgttccgaaaaagtctcccgccgtatcgcacaaatggaagccgatctgaaccggcttcagaaagagagcgatacgctgactggtagggtgtatgacccggcagtacagcgtccgttgcgtcagacccgcacccgtaagccgttccctgaatcactaccccgtgacgaaaagcgactgttgcctgcggcgccgtgctgcccgaactgcggcggttcactgagctatctgggcgaggatatcgccgaacagctggagttgatgcgtagcgccttccgggttatccggacggtacgggaaaaacatgcctgtactcagtgcgatgccatcgtgcaggcacctgcaccttcgcggcccatcgagcggggtatcgccggaccggggctgctggcccgcgtgctgacctcgaagtatgcagagcacaccccgctgtatcgccagtcagaaatatacggccggcaaggtgtggagctgagccgttcactgctgtcgggctgggtggatgcatgctgccggcagctgtctccgctggaagaggcgcttcatggctatgtgctgactgacggtaagctccatgctgatgacacgcctgtcccggtgctgttgccaggcaataagaaaacgaagaccgggcggttatggacctgcgttcgtgacgaccgtaacgccgggtcaacgctggcgccggcggtgtggttcgcttacagcccggacagaaaaggcatccatccgcagacccatcttgcggggttcagtggtgtactgcaggcggatgcatacgccgggttcaacgagctgtaccgggatggccggataacggaagccgcctgttgggctca

SEQ ID NO: 110 - DNA, 28763 bp, Escherichia coli
gccgaacaggaagcgctgatccacgccctgcaggaaaagctgagcaaccgggagcgcgaaatagaccatctgcaggcgcagctggataaactccgccggatgaacttcggcagtcgttccgaaaaagtctcccgccgtatcgcacaaatggaagccgatctgaaccggcttcagaaagagagcgatacgctgactggtagggtgtatgacccggcagtacagcgtccgttgcgtcagacccgcacccgtaagccgttccctgaatcactaccccgtgacgaaaagcgactgttgcctgcggcgccgtgctgcccgaactgcggcggttcactgagctatctgggcgaggatatcgccgaacagctggagttgatgcgtagcgccttccgggttatccggacggtacgggaaaaacatgcctgtactcagtgcgatgccatcgtgcaggcacctgcaccttcgcggcccatcgagcggggtatcgccggaccggggctgctggcccgcgtgctgacctcgaagtatgcagagcacaccccgctgtatcgccagtcagaaatatacggccggcaaggtgtggagctgagccgttcactgctgtcgggctgggtggatgcatgctgccggcagctgtctccgctggaagaggcgcttcatggctatgtgctgactgacggtaagctccatgctgatgacacgcctgtcccggtgctgttgccaggcaataagaaaacgaagaccgggcggttatggacctgcgttcgtgacgaccgtaacgccgggtcaacgctggcgccggcggtgtggttcgcttacagcccggacagaaaaggcatccatccgcagacccatcttgcggggttcagtggtgtactgcaggcggatgcatacgccgggttcaacgagctgtaccgggatggccggataacggaagccgcctgttgggctcacgcccgccgtaaaatccacgatgtgcacgttcgcaccccgtcagccctgacggaggaagcgctgaaacggatcggcgaactgtacgccatcgaggcagagataaggggaatgacggcggagcagcgccttgccgaacgtcagttgaaaacgaaaccgctgctgaaatccctggaaagctggctgcgtgaaaagatgaaaaccctgtcgcgacactcagaactggcgaaagcgttcgcatacgccctgaaccagtggccggcgctgacgtactatgcagatgatggctgggctgaggcggacaataacatcgctgaaaatgcgttgcggatggtcagtctgggccgcaaaaactacctgttcttcggttcggatcatggaggagagcggggagcgctgctgtacagcctgatcgggacgtgcaaactgaacggagtggagccagaaagctacctccgctatgtccttgacgtcatagccgactggccgataaaccgggtcggcgaactgctcccctggcgcgtagcactgccgactgaataacacatccccgtcaatacggttcttgctgcacgcttacccttctgttgctcactcagggcatgtaaatcatgctcaaaccacgccccctgagcatctgtctgcagaatcaaccggccatgacaggaaaggcagaaacaatgccggatatttctgctgagcgcagagtcggcactgataatgtgctcacccggcgtgatccccagccccgtttttataccgttcattctgctccccgtcctcactgaagcgcccggtctggcagtgtgtgcagtactgctccccataataatcgtggtgacattgcctgcagtaccagctggctttacgtaccacgggtaaggcatccgggacgaattgctgcagacgtttaatcaaccgtatttctctgcgttccggcctgacataaggacattgctgcgcgtgctccgtcagcccgtcgtcagtgtgttcaaaccagggacgttccgtgtcgtgctgcgggtggtatctgagtgcactgccgcaaaggtggcaggtgtagtaagcataaggtgcggtctgtgcggtacgggcaccggtcagacgtccgttgccatcaagtgcgagaaaagattttgcgtacatagtgtggttccttaccgccagacgacacgcaggcaacagccgtcccggtacgggcagcgtggtcaggtgtgaatggcggttttcagttcagtctcagaagggaaaatcagtgtggtcgctgtgaacacgtcatcacactgaagtcagataagtcgtctgtcgggctcagccacgactgcagccaaagttgcgctcaccggtgccgtaagctttggtactctccttcgccagatagtcagcacgctccagcacctgctgaaagccggtgtcatcatcgcgttccagccacaccgccggcctgaccggaaaatgtgccagcgtgtcataacgtccggcatccactcccagggcactgcaccacgcctgtttaatcatcccggccagtgatcccggagcgcggtaatcgccggcacgacaccaggtatcccggttgaccagcagcatcaggtgatagtgttttttacctttgcactccccaaactcccgggcccagacgtaatgcagggttgtgggatgcacgcgtttaccttcccgatgcttacgtttctggtaagcgtcgattcgggctttcagggcattgatgaagcgggatatcacagctgcctccgttgctgccggtacatccgggaaacgcaggtcaacccgcaatgccgtcaggcggggatgaacattcagtgcgtgccgcaccgtctcacgaatacgttgctgccagaaggggttgtatttgtaggtcatggttaaatctccgtatggttcatacggaataaccacgtcgtaaaaaatgcgcagagcccctgaggtgacctccggcaggacactgtctcaggcactctgtgataacccgaacggtcatcgccggactgacgattgaattcccggcgttgtttttttaatgtaaaaaacaggttacggataaggcgtggagagggagcgatcgtgatacgcaaaaagaagtgcagggactgtggtaacgcaattactcataatacagtatgttgcccgtattgtggtgctgtcgaccccttcggttattaccggaagaccgatcgtctgctctgtttactgacgttactgctggtgctgattctggttaccgtttcaggcgtcagtgtatttgtactgttgcagtaggttacaggggagggattatcaggagtcggcggggcagagcgacccgctgcgtttgttgtgccagacagtaacgcaccggatccctgcaaaatggtacctgaatcaatcacagtcaggtttctgccaatccgtgatcgaatcgagcggaatactcagccccgacaaatacgagtccccttcagaagatacaggccggtaatgcctgaacgcctgcccctctgtacaccattcccttttgatttcgaattctttgttgccgttatactgcttaatgttcccgatcttccggtgcacagataacaccagagtcatcgtagcgcggattcaagattcaggtgacatatttccagacggaagccggcacgcgatcgtaaagtttgttcattgtcagttctgccagccggtgatcgaccgcagagttaaaggcttccagctccgcaggggtaagtttataacgtgtgcgggtaatcactttttccagcgtctcccgggatgaacaacgacggaactgctctggttttaacttccattcgtctctcgttactttatgctgcaatcaacgtgatactgccagcataccgcacctgactggcattctggtaccctccccaaactcattactcccgtgccaccacttaaccggtctctcagcaatatcgccttaacgctacgtttagttatccgacaccggatgtccgatgccattgcgacaacctgaaggtaaccagccagttagctgaggtgttaagctgctggatgcatacaccttgccaaatctaatcgctcttaaccaatttccaggatacaagggggcgattactgagaatgctctcagactgtcactcaccagatcggatacgtttaccgctcaggcggatgcttaatgcactctgttcaggtgcattgcaggtacgttttatgtacgcaggttatacgccagttatcagggataaccctgtgagtacaacgcaatctgttgctactgggtagactggtctgctgatcacactcacagatttatttcacatatatgaactcatgtgtttgatctcatgtgtttgatctctcttatatatttataataccaatcagacagtcttatcccaccagtgataactgtcgcctgcccacaggtcacaggtcacaggctgatataccacaaccgccttcaaaaacaactctgcaattatcagaacgctagttttccccttgtctcacgaaagtcctccctcctttatcgcgtgcggaagcatcgtttcgcaacaaccacccgacataccggtacggctcagccaccgcaatccccccgtttatctcctgacggtcacattcccgattattttttacgtttctccccggttgttatgccggtgaaggtggtgcgttgttttcatcaccaacgccggttgagattaacaacatccggaggaacattctcatgaccaccccagtttcactgatggatgaccagatggtcgacatggcgtttatcactcaactgactggcctgaccgataagtggttttacaaactcatcagggatggggcctttccggcccccatcaagctgggccgcagttcccgatggctgaaaagtgaagtggaagcctggctgcaggcgcgtattgcacagtcccgtccgtaattcctgaccgttatccgttcaaccgcagcaaaggcatgatccggcccccggaggcattttgctgcgcgctaaaggagagaatattatgcaaaaacttgaaaaccggtgtgagctgctgctcatccagcatcagaaatggatgacaaacgtgacgaggcttatcgtcgctcatggaatgggggctccgcatcttcatggttatcaccgcctgaccctggcccacttttttctgccagaaaaaggcaccatcatctcagtggcaccacagggactctatcaggtcgtcaacccgggaacaccaccgttcattcctgccattcaggaagggttaatgaccagcattcagacccatgaaatcatgctgcttacacattttaatctgggcggcgttttactcagtgagctacatcgtctgggtgaaaaccggctggcaaacaggctgaacagcctgctccggcgtttcgacgatcgtgatctctaccacacgctgatatggctgtgctggtatgatctgatgtgtgcccactccatgcagccctggactgaagagttaaagcataaatcacatgcagagcttgaaaactgggctgtggcgcgcaaacgggaaaagcgcgagctggaactgatgattgacgagtacctgttatacgcctgttgattcataacgctcccgggcctccgcacacttacttttcctccgtcaccctcatgcagaagcgggggtgacgggcatactgcgataccaccactgaataatccgtctcagcaacagggaacattataagccaaaggattgctcatgccatcttatcagtttctggctgtagcacgcattcagttcaggcagcgtgatattgtttatttcggaaagcaggacataggtggtttttccttcctgcacgacagagagcctgagttgagatgcaagaatgttcagcaggacgttcagctttttcctgttccggaaccggcccgggccacactggagaatataatttttcctgacacggggcgggcattctccgcggcactcctcaatgagccagtcgagcagctcccgggcgtcctgcagctgcagttcagattcatcaggtaacgcaaataattttttatattcatctgtgtaccacgaacttattacgacagcagacgtcatgatatcggcagagattttcccttcaccctgactgaaatactgcaataacgcagcaattctcgcaatgttttctgttttttttgaaacatgcccccgaaactggcttaagggtccggaaggagacaaatcctgctccagaacattatagtgatcaataaatattttttgcgcttcaggagaaaaatgcagacaataacgttcatccttactggatttttcaatactgcctctggccagttccattaatcgttcatgaaatgccgttaatgatcctcccggggtcacagctccgttaataaagcgtttcccctgcgtggtggcaggtttactgattagacaacgggcaagaaaaccactgtccctggcaacagaaccttttcgctccatatatcggtcaaaaagaccgggttgtaccatgagggataatgtcattctggcattttcaatcatctgttcgggttcattctttctgtccaccgacaatacggagccatcccacattttgttaataaaaggcagctcagacagggtatacccatcaaatattataccggcttcatcagacatgatacccactgaacgccactgaccacaaagctgatctttaattgctgctgtcgtggcatcattaaaaatgaatttatatcttacaggtttttcccctctgtttttctgaagcgcttccagttgtctgagcgtttctgactcatccgcgcctttgcggagttctttattcagttttgacaacaatgcttttttctgcgcctttaaaagctcttccttatttttccatgtcgtcagttcatttttgtgtctggaatataacagcatctcctgctggtacaggggctccattaataatttgtccactgcggtttttcgttctccggactcagcaagcgtcagtaagaaaagagaaaccggcccccgcagtgtattcagtctgcagacatcaatcagattctggcagacaagtgaaacagcgcccagggcagatgctgccacaagccccaggggagcctgcgtgatttgctgagcttcaataacggcatcacgaatgagtggaggcagcgagctcaggggaaactcatcaggatactgaaagtatggcataatgacctcacaacacacagaacataaagtaccgcaactattgctactaatagcaaaaatagcagcagaatcaatacaggataaaaatttctgtcgattttcagattaaataataaccattcggtattttgtcgctaaagaatgttagaatgaatctgtgcgtctacgggcgctctccggaacacacgtgttgattaattttcacacaacaacgtaccagcaaaaagcatcatccagggtattgcaggtacgggtttcctgccgggaataaacataaacagtttccccggagtaacgctttcagaaaactgccctcctgaagaagaataaaataaagaagatgacagttcctgcactgaatgctgagtacaatattctatggacaggatgacatttttataaataacaaaaaccatttaatactgatacatcaataaaatacttcctccctgctgacacagataaaatgcaacattttttcttcaaatacttctgtataatcgccagccaatgatgagaatggattaaaataacacttcttcgacaaacacaaaaaccagccttcattttcacatcatcatccagttttaattaaaccctgacgagcgacagtatttcagttcaggaattaaaagccagctattactcagtaaaaacaccaccaactaataatatctcagcagatatttcctgaccaggatgacacatttattaaagtttttttacaggacacttcacattactgaacgctattccgacagtatcactacacaaataaaaaagggaactggataaatattcatgccggaagaatggtgtaacaaaagcatttaatcattacgtgcgtattcctctctattcgatcacggtttggccaaaccgtgatcgattcagatgccattttgcaagtacgcatgacccggaagggaaacacttaacaacatggtatcaacagatatcattacgtgcgcactcttataaaaatacacagcagaagcaagataactctaaacgtaaatttaatatctcccactgactgccccgacaatatactgaaaaatactcacctcagtaaacataaacacacctgataatcaggctgcaagatgaatatttttctcctttacggagtaatcagcctgctgtttaacaataaccgcgtattttcatggaaggatatcacccaataacggataactcctgccctccttcatgttaatactcaacatccccatcgattccaaacaatttcagacagatattatctccgtggatcccccgccacctttccggtgtgcggggttttgtcttttttcaccgggaatacatgtatgaatccgtctgatgccattgaggcaattgaaaaaccgctctcctccctgccttactcgctttcccgtcacatcctggaacatctgcgcaaactcacccgtcacgagcccgtgattggcattatgggtaaaagcggggccggtaaatcttcactctgtaatgccctgtttcagggggaggtcacaccggtcagtgatgttcacgccggcacccgggaagtgcagcgcttccgtctgagtggtcacggttacagcatggttatcactgacctgcccggggtgggcgagagccgggacagggatgcagagtatgaagccctgtaccgtgacattctgcctgaactggacctggtgctgtggctgattaaagccgatgaccgggccctgtctgtggatgagtatttctggcgacacatcctgcagtgcggacatcagcaggtgctgtttgtggtgacacaggccgacaaaacggagccctgccatgaatgggatatggccggcattcagccctctcccgcacaggcacagaacattcgcgaaaaaacggaggcggtattccgtctgttccggcctgtacatccggttgtggccgtatcggcccgcaccggctgggaagtggatacgctggtcagtgcgctcatgacagcgcttcccgaccatgccgccagtcccctgatgacccgcctgcaggacgagctgcgcacggaatctgtccgcgctcaggcccgtgagcagtttaccggtgcggtggaccggatatttgacacagcggagagcgtctgtgttgcctctgttgcacgcacggttctgcgtgccgtccgtgacacagtggtctctgttgcccgcgcggtatggaactggatcttcttctgaacctgttgtggatgatgtcctccctgcctctgagtctgctcacaaaagcgctgttttcgttactgtctctcttgtccgtgcaatagcttgataatagaataaaacgatcaatacctattttaccgatcgttaatatcgatcgttatgctaataataactcctgttagcaacgtgcgcagatacacacagacatgagattcagggaacaacagagccacacgtcagaaacttccgtcagccggacctccggcactgtaaccctttacctgccggtatccacatctgtggataccggcttttttattcaccctcactctgattaaggaaatgctgatgaaacgacatctgaatacctgctacaggctggtatggaatcacattacgggcgctttcgtggttgcctccgaactggcccgcgcacggggtaaacgtggcggtgtggcggttgcactgtctcttgccgcggtcacgccactcccggtgctgtctgctgacatcgttgtgcacccgggtgaaacagtgaatggcggaacactggtaaaccatgacaaccagtttgtatccggaacagctaatggcgtgactgtcagtaccgggcttgagctggggccggacagtgacgaaaacaccggcgggcaatggataaaagcgggtggcacaggcagaaacaccactgtcaccgcaaatggtcgtcagattgtgcaggcaggaggaactgccagtgatacggttattcgtgatggcggagggcagagccttaacggactggcggtgaacaccacgctggataacagaggtgagcagtgggtacacgggggagggaaagctgccggtacaattattaaccaggatggttaccagaccataaaacatggcggactggcaaccggaaccatcgtcaacaccggtgcagaaggtggtccggagtctgaaaatgtgtccagcggtcagatggtcggagggacggctgaatccaccaccatcaataaaaatggccggcaggttatctggtcttcggggatggcacgggacaccctcatttacgccggtggtgaccagacggtacacggagaggcacataacacccgactggaggggggtaaccagtatgtacacaacggtggcacggcaacagagacgctgataaaccgtgatggctggcaggtgattaaggaaggaggaactgccgcgcataccaccatcaaccagaaaggaaagctgcaggtgaatgccggcggtaaagcgtctgatgtcacccagaacacgggcggtgcactggttaccagtacagctgcaaccgtcaccggcacaaaccgcctgggagcattctccgttgtggcgggtaaggctgataatgtcgtactggaaaatggcggacgtctggatgtgctgagcggacacacagccactaatacccgtgtggatgatggcggaacgctggatatccgcaacggtggtgccgccaccaccgtatccatggggaatggcggtgtactgctggccgattccggtgccgctgtcagtggtacccggagcgacggaaaggcattcagtatcggaggcggtcaggcggatgccctgatgctggaaaaaggcagttcattcacgctgaacgccggtgatacggccacggataccacggtaaatggcggactgttcaccgccaggggcggcacactggcgggcaccaccacgctgaataacggcgccatacttaccctttccgggaagacggtgaacaacgataccctgaccatccgtgaaggcgatgcactcctgcagggaggctctctcaccggtaacggcagcgtggaaaaatcaggaagtggcacactcactgtcagcaacaccacactcacccagaaagccgtcaacctgaatgaaggcacgctgacgctgaacgacagtaccgtcaccacggatgtcattgctcagcgcggtacagccctgaagctgaccggcagcactgtgctgaacggtgccattgaccccacgaatgtcactctcgcctccgatgccacctggaatatccccgataacgccacggtgcagtcggtggtggatgacctcagccatgccggacagattcatttcacctcctcacgcacagggacatttgtgccggcgactctgaaagtgaaaaacctgaacgggcagaatggcaccatcagcctgcgtgtacgcccggatatggcacagaacaatgctgacagactggtcattgacggcggcagggcaaccggaaaaaccatcctgaacctggtgaacgccggcaacagtgcgtcggggctggcgaccagcggtaagggtattcaggtggtggaagccattaacggtgccaccacggaggaaggggcctttgtccaggggaacaggctgcaggccggggcctttaactactccctcaaccgggacagtgatgagagctggtatctgcgcagtgaaaatgcttatcgtgcagaagtccccctgtatgcctccatgctgacacaggcaatggactatgaccggattctggcaggctcacgcagccatcagaccggtgtaaacggtgaaaataacagcgtccgtctcagcattcagggcggccatctcggtcacgataacaacggcggtattgcccgtggggccacgccggaaagcagcggcagctatggcttcgtccgcctggagggtgacctgctgagaacagatgttgccggtatgtctgtgaccgcagggatatatggtgctgcaggccattcttccgttgatgttaaggatgatgacggctcccgtgccggcacggtccgggatgatgccggcagcctgggcggatatatgaacctgacacacacctcctccggcctgtgggctgacatagtggcacagggaacccgccacagtatgaaagcgtcatcgggcaataacgacttccgcgcacggggccggggctggctgggctcactggaaaccggtctgcccttcagtatcactgacaacctgatgctggagccacggctgcagtacacctggcaggggctttcgctggatgacggtaaggacaacgccggttatgtgaagttcgggcatggcagtgcacaacatgtgcgtgccggtttccgtctgggcagccacaacgatatgacctttggtgaaggcacctcatcccgtgcccccctgcgtgacagtgcaaaacacagtgtgcgtgaactgccggtgaactggtgggtacagccttccgttatccgcaccttcagctcccggggtgatatgcgtgtggggacctccactgcaggcagcgggatgacgttctctccctcacagaatggcacatcactggacctgcaggccggactggaagcccgtgtccgggaaaatatcaccctgggcgttcaggccggttatgcccacagcgtcagcggcagcagcgctgaagggtataacggtcaggccacactgaatgtgaccttctgacagaaccatcgcctctctgtggtcccggtcatcatgaccgggacccggaccggcgcaacggatcttcaacgccacattcgctggcattaacgtgtcgttacggggaagtcatcttcacagggatcttcggtcagttagtattaccgacatccattcaccaacttaccggagataatcgatgtcaaaaccccgatggaccattgaacagaaaaggcagcacgttgctgcctggcgcgccagtggtcttacacgtcagcaatactgtgaactcaacgatattcccttcacatcacttcgcgaatggccgcaggatgtcgcaaaagctgaacgccgggcaaatgaaccgaccgttcttcccgttcatattgcgccaccactgcatgctgatgtaccacagcccgtcacgaatgagccagtcacgctcttccttcccggtggagtacggatgtgctgtcagccgtcacaacttaccgatgtcttcagggcactcaaatatgctcagtcctgataatgtcttcatcgcaattaaacctgttgacatgcgccggggcatcgactcactgacgcagtatatacaggatgaactccggtcgacatggcatgagggagccgccttcgtctttgttaacaaagcccgttcgcgtatcaaagttctccggtgggataaacacggggtgtggttgtgtacccgccgtctgcacaaaggcagcttccgctggccacgtgcaaatgacgctgcctggcacctcactcccgacgagtttaactggctgattgccggtgttgactggcagcaggttaagggacatgacctgacgaaatgggtctggcagaatgaacctgaactgcgccctgaaaacacgcaaaatacactgctaactcagtgaaaaataatgaatatccgtatctggagtggtatactcccctgtatggatatctccgctctcaacaccacgaatgacatcgaaaaactgcgtgctatggcacttgccatggtacaagaagtcatgtcggagaatgccgaaaaagagcgggaattactggagaaaagccggcgcatccagcttctggaagaaatgctgaaactggttcgtcaacagcgcttcggaaaaaaatgtggaacgctggctggtatgcaacgctccctgttcgaagaggatgttgatgccgatatcgccgcgcttaccgcacatctggataaactgctcccgcaatcccctgaagaagacgaaaaagcgtcccgttcacgcccgatacgcaaacccttaccggttcatcttccacgggtggaaaaaattatccagccggacactgaccattgccctgaatgtgacgagccgctgcactatatccgcgatgcggtgagtgaaaagctggagtatattcccgctcactttgtggtgaaccgttatgtccgtccacaatacagttgtccctgttgccagaaggtgttcagcggtgaaatgccggcacatatcctcccgaaaagtgccgttgagccatcagtcatcgcacaggtgatcatcaataaatacggtgaccacctgcctctgtatcgccagcaacaggtctttgcccgttcagatgtcgggctgcccgtcagttcgatggctgacatggttggcgcggcgggtgccgcattatctcccctggcggcgttactccatcgcgagttgataaaccgtccggtggtgcatgcagatgagactaccctgaagatcctgaacacgaagaaaggcggtaaatcctgctccggttatctgtgggcatacgtcagtggagaaaggacgggaccgtcagttgtgtgcttcgactgccggaccggacgtagccatgagtatcctgaaaactggcttcagggctggggcgggacgctggttgtcgacggacataaagcttaccggactctggcaaacaaagtgccggagatcacgctggccggatgctgggcccatgcccgcaggggcttcgccgacctgtataaaatcagtaaagatccacgggctgccatagccgtgaagaaaatcgcggggttgtaccgtcttgagaagaagatcagtagccgccccgtggaaaaaatccgccagtggcgacagcgttatgcccgtccgatactggaagaactgtggtcatggcttgaagagcaggaaccgcaatgttctccgggaagggcattacacaaagccattgcctatgcgctgtctcatcgcgtggaactgagccgcttcctggaagatggtgcggtgccgctggataataatgtgtgtgaacgggccatcaaaaacgtggttctgggcagaaaatcgtggctgttcgccggttcgcagatggcgggagaacgcgccgcgcaaataatgagcttgctggaaaccgcgaaacgcaacggtctggagccgcatgcctggttgacagacgtcctgatgcgtctgccggagtggccggaggagcgactggcagagttgctgcctcttgagggatttaccttctccgggtgagtgatacctgccgtcaggtgttcgtgcaccgggccataacctgcagtcgggagttgaactcctgacggcaggaaatgagccagaccagcaaccacgcgggctgacagcgaataagaacctgaatcagcccggagtcattcccgggtcagtacatcatcacctgctattaatccccgagtcagtacttcgcggcctgacgcgatcaccctactcagtacttcagagcccgcctccggtacctgcctggcgatcgcccctgtgcaacaaaataaatcaaccgttatcaaaccacgatcgttcgtatgcgccgtaaccggctcatttagaccgtctggtctgtttcctccggctctacaaaaataatgtccatcatttttaatggacactatcgtatgaaacaccggacctggatcactgaagctttacgtcttcactttgaagaacatttaccccgggttgtggccgggcgtcgcctgggtgtaccaaaatcaacagtttgtagtatgttcgtgcgctttcggagagctggcctttcgtggcctttgcccgcaggcatgtcggagcaggaacttgatgcctgcctttacggacaattttccacggtaccagtcgtacgtcctgaaagcaccgttatatccgaagcccccgtggtaaaaaaacgtccccggcggcccaacttcccttatgagtttaaaatcgccttagtggagcagtcactgcagcccggagcctgtgtggcgcagatcgcccgggaaaacggaatcaacgataacctgctcttcaactggcgccatcaataccggaaaggtggcctgctgccttccggaaaaaatatgccggcactgcttcccgtgacgttaacgccggagccggataataaaatcccggcccccgcacaggaaccagagcagataaatacaccgtccgacagtctgtgttgtgagctggttctgccggccggaactctcaggcttaaaggtaaactgacgccggcgttattacagacacttatccgcgaaataaaagggagcagccactgatgatatctctccctgcaggttcgcgtatctggctggttgcaggtatcaccgatatgcgaaatggctttaacggcctggcatcaaaagttcagaacgtcctgaaggatgacccgttctccggacacctgttcatcttccgcggacgccggggtgaccagataaaagtgttgtgggctgacagtgacggactgtgcctcttcaccaaacgcctggagcggggccgcttcgtctggccagtcacccgtgacggcaaggtgcaccttactccggctcagttatccatgcttcttgaaggtatcaactggaagcacccgaaacgaacggaacgcgctggaatccgcatataacccgttgtaaagtgaggatatggacacctcacttgctcatgagaacgcccgcctgcgggcactgttgcagacgcaacaggacaccatccgccagatggctgaatacaaccgcctgctctcacagcgggtggcggcttatgcttccgaaatcaaccggctgaaggcgctggttgcgaaactgcaacgtatgcagttcggtaaaagctcagaaaaacttcgtgcaaaaaccgaacggcagatacaggaagcacaggagcgaatcagcgcacttcaggaagaaatggcggaaacgctgggtgagcaatatgacccggtactgccatccgccctgcgccagtcttcagcccgtaaaccgttaccggcctcacttccccgtgaaacccgggttatccggccggaagaggaatgctgtcctgcctgtggtggtgaactcagttctctgggatgtgatgtgtcagagcaactggagcttatcagcagcgcctttaaggttatcgaaacacaacgtccgaaacaggcctgttgccggtgcgaccatatcgtgcaggcaccagtaccttcaaaacccattgcacgcagttatgccggagcggggcttctggcccatgttgtcaccgggaaatatgcagaccatctgccgttataccgccagtcagaaatataccgtcgtcagggagtggagctgagccgtgccacactggggcgctggacaggtgctgttgctgaactgctggagccgctgtatgacgtcctgcgccagtatgtgctgatgcccggtaaagtccatgctgatgatatccccgtcccggtccaggagccgggcagcggtaaaacccggacagcccggctgtgggtctacgtccgtgatgaccgtaacgccggttcacagatgcccccggcggtctggttcgcgtacagtccggaccggaaaggtatccatccacaaaatcacctggccggttacagcggtgtgcttcaggccgatgcttacggtggttaccttatacgaatccggcagaataacggaagccgcgtgtatggctcatgcccggagaaaaatccacgatgtgcatgcaagagcgcccacctacatcaccacggaagccctgcagcgtatcggtgaactgtatgccatcgaggcagaggtccggggctgttcagcagaacagcgtctggcggcaagaaaagccagagccgcgccactgatgcagtcactgtatgactggatacagcaacagatgaaaacactgtcgcgtcactcagatacggcaaaagcgttcgcatacctgctgaaacagtgggatgcactgagcgtgtactgcagtaatggctgggtggaaatcgacaacaacatcacagagaacgccttacggggagtggccgtaggccggaaaaactggatgttcgcgggttccgacagcggtggtgaacatgcggcggtgttgtactcgctgatcggcacatgccgtctgaacaatgtggagccagaaaagtggctgcgttacgtcattgaacatatccaggactggccggcaaaccgggtacgcgatctgttgccctggaaagttgatctgagctctcagtaaatatcaatacggttctgacgagtcgcttactatgcgccgccgatgacgcgcgcctgaaaaacgcgtcaatatgagttccccggaagcttacgcattaacaataacatgatattcatcacggagtgactatgttacagatagtcggcgcgctgatcctgctgatcgcaggatttgccattcttcgccttttgttcagagcattaatcagcacggcgtctgcgctggcagggctcatattgctgtgtctgttcggcccggccttactggctggctatatcaccgaacgcataacccggttgttccatattcgctggctggcaggcgtatttctgacgattgccggaatgatcatcagcttcatgtggggacttgatggtaaacatatcgcgctggaggctcacacctttgactctgtgaaatttattctgaccaccgctctcgccggtggtctgctggctgttcccctgcagatcaaaaacattcagcagaacgggatcacaccagaagatatcagcaaggaaattaacgggtattactgctgtttttatactgccttttgccttatggcgtgttctgcatgcgcaccattgatcgcgttacagtacgatatttcaccgtcactgatgtggtggggcgggttgttgtactggctggctgcattagtgacgctgctatgggcggccagccagatccaggcgctgaaaaaactgacctgtgccatccgccagacactggaagaacaaccggtgctcaacagtaaatcgtggctgaccagtttgcaaaacgattacagccttcctgactcactgacggagcgcatctggctgacgctcatttctcaacggatttcccggggagagctgagggaatttgaactggcagacggaaactggctactggacaatgcctggtatgaaagaaacatggcgggtttcaacgaaaagctgagagagagcctgtcatttacccctgatgaactgaaaaccctcttccggaaccgcctgaatttatcaccggaagcgaatgacgattttctcgatcgttgcctggacggcggtgactggtaccccttttcagaaggccgccgttttgtatcattccaccacgtggatgagcttcgtatctgtgcctcctgcgggctgacagaagtacatcatgccccggaaaatcataagccggatccggaatggtactgctcctctctttgtcgcgaaacagaaacactgtgtcaggacatttatgaacgttctcacaccggttttatttccgatgcaacggcgaatggtctgattctcatgaaactgccggaaacctggagtacaaatgagaaaatgtttgcttccggagggcagggacatgggtttgccgctgaacggggaaaccatattgtcgacagagtccgtctgaaaaacgcacggatcctcggtgataataatgccagaaatggagcagacagactggtcagcggaacagaaatccagacgaaatattgttcaactgcagyccgtagcgtcggtgcggcattcgacggacaraacggacagtatcgttacatgggaaatcatggtcccatgcaactggaagtcccccgtgatcagtatgccggcgctgtggaaaccatgaagaataagatccgcgaaggtaaagtacccggtgtaaccgatcccgcagaagcgtcccggctgattcgtcggggacatctgacttatacccaggcccgtaatatcacccggttcgggaccatcgaatcggtcacttatgatattgccgaggggtcggttgtcagtctggcggccggagggatcagttttgccctgacgacatcggtcttctggctcagcaccggcgatcgcgatgctgccctgcagacagctgctgtccaggcaggaaaaaccttcacccgcacactggctgtctacgtcacaacccagcaacttcaccggctcagtgttgttcagggtatgctgaagcatattgatttttcgacggccagcccgactgtccggcaggcgcttcagaaggggaccggtgcaggaaatatcagtgccctgaacaaagtgatgaagggtacgctggtgacatctctggcactggtagctgtcacaaccggccctgacatgatcaaaatgttgcggggacggatctccggtgcgcagttcatcaggaatcttgccgtggcatcttccggtgtggcaggtggagctgtcgggtcagtggcgggcgggatattgttcagtccactgggaccatttggtgcactgacagggcgtgtggttggtggtgttctggggggaatgattgcctccgctgtatcaggaaaaattgccggagcgctggttgaagaagatcgcgtcaaaattctggcaatgattcaggagcaggtgacatggcttgccggcagtttcctgctgaccggacatgagattgaaaatctgaacgcgaatctggcccgtgttatcgatcagaatgctctggagatcattttcgccgccggtatacaacaacgggccgcgaccaacatgttaatcaaaccactggtggtcagtatcatcaggcaacgccccgtcatggaatatgatgcatcccatctcggcaatatggttaaccgactggaagaaacattacccccggagttaccggcataacggctattctgcgccttttacgttttatcacctgatttgtcagtgtcatcgtcatgactcagagaggtaaataccatgattcacctgttcaaaacctgcatgattaccgccttcattctggggttaacgtggtctgccccactccgggcacaggatcaacgttacatcagtatacgcaatacagatacgatatggctcccgggaaatatttgtgcttaccagttccggctggataatggcggaaacgatgaaggatttggccccctcaccatcactctgcaactcaaagacaaatatggtcagacgctggtgaccagaaaaatggaaacggaagcctttggtgacagtaatgccacgcgaaccacagacgcatttctggaaacggagtgcgtggaaaatgtcgccacaaccgaaatcattaaagcaactgaagaaagtaacggccatcgtgtcagtctgccgttatcggttttcgatccccaggactaccatccactgctgattaccgtttccggaaaaaacgttaactgatccctgaagtcagtttcatgcttcagcctctgtcacaacgcgtggcagaggctttttatttatcaggagaaaacagatatgccgggttacacagagtatgtcctggctgaaggatctttctcatacgggcaggcggttgctgtcataaccgcttaccgcaatgtgtttatccaggatgacccgggaatgcatttccgtcgggttatccgcaacgcggaaggtcagcgacgctggcgctgccggaactctgaagctgatgccggaaaacagcttaatgcgtggctcgccagtggagggcttctcagacaataaacctcattgatttcatccatcaggccgcgtcttctccgggagacgcggcttttttcatttattacaccagtaaatcttaaccaccgataaggagcaaattatgcgactagccagtcgttttggttatgcgaaccagatacgccgtgaccgtccgctgacacacgaagaactgatgcactatgtgccggggattttcggggaagataaacacacgtcccgaagccagaactatacgtacatccccaccatcaccgtactggaaagcctgcagcgggaaggctttcagccattcttcgcctgccagacccgtgtgcgcgacccgggccgccggggatacacaaaacacatgctgcgtctgcggcgggccggagagataaacggagaacatgtccctgaaattattctgctcaactctcatgacggtacctccagctaccagatgctgccgggttacttcaggttcgtctgccagaacgggtgcgtctgtggtcagtctctgggggaagtgcgtgttccgcaccggggaaatgtggtggacagagtcattgaaggggcttacgaggtagtgggcgtgtttgaccggattgaggaaaagcgtgatgccatacagtcgctgattctgccgccaccggcacgccaggcgctggcacaggcggcactgacttaccgttatggtgacgaacatcagcccgtcaccaccgccgacattctgacgccacgacgccgggaggattacggtaaggacctgtggagtgcttatcagaccattcaggagaatatgctgaaaggcggaatttcaggtcgcagcgctaaaggaaaacgtatccatacccgtgccattcacagcattgacactgacattaagctcaaccgcgcattgtgggtgatggcggaaaccctgctggagagcctgcgctgattcagccattaccctgaaaaccacgcatttatttgtcctttaaggagtcatttcatgaaaaccatttcacataattccaccacatcttctgtttccgtaaccgctgcatcagggaatgaccagcctcagttggttgccaccatagtccctgatgaacagcgcatcagcttctggccgcagcattttggcctcattccacagtgggtggccctggagccccgtgttttcggctggatggaccgtctgtgcgaagactactgcggtggtatctggaatctgtacaccctgaacaacggcggggcatttatggcccccgaaccggatgacgatgatgacgaaacatgggtactgttcaatgccatgaacggcaaccacgctgaaatgagcccggaagccgctggcattgctgcctgtctgatgacgtacagtcatcacgcctgtcgtacggagtgttatgccatgacggtccattattaccggctgcgggattacgccctgcagcatccggaatgcagcgccattatgcgcatcatcgactgaatggaggcagggacaatgcagcagctttcctttctgcccggagaaatgacgcccggcgagcgcagtctcattctgcgggctctgaaaaccctggaccgccatcttcatgaacccggcgtggccttcacctccacccgtgcggcacgggaatggctgattctgaacatggcgggactggagcgtgaagagttccgggtgctgtatctgaataaccagaatcagctgattgccggtgaaaccctcttcaccggcaccatcaaccgcacggaagtccatccccgggaagtgattaaacgcgccctgtaccacaatgccgctgccgtggtgctggcgcacaatcacccgtccggtgaagtcacacccagtaaggcagaccggcttatcaccgaacgtctggtacaggcactgggcctggtggatatccgggtgccggaccatctgatagtcggtggcaaccaggttttctcctttgccgaacatggtctgctttaacccgtcacaaccacatcacacctgttttcacttttatcttctgtcttcagaggtatcccattatgaaaattatcactcgtggtgaagccatgcgtattcaccaacaacatccgacatcccgtcttttcccgttctgtaccggcaaataccgctggcacggcagcactgaagcgtataccggtcgtgaagtgcaggatattcccggtgtgctggccgtgtttgctgaacgtcgtaaggacagttttggcccgtatgtccggctgatgagcgtcactctgaactgagtcagtaaaggcattctgatgagcagcattatcaccatcacagtgtatacgctggatgaactttcctgcccggcacggggaaaagcccgcgactggtaccgtcagcatcatgctgacagcaactggtatgaaaacgtgtatgaagacttcagggaggtctgtggcattttcgggattgacctccgccagcgcgttttccggctcagcaatggcaggtttatggaagagccgtgcatctggttcagcggattctgcagccagggggacggagcctgttttgaaggacgctggcactggcagtctgcaacagcccggagaatcagggagcatgcaccgcaggagcgtgagcttcatcgtattgctgataccctgcaggcggtgcagaaacgtaacttctggcagcttcaggctgaaatcagtcaccggggacgttactgccatccgtacagcatggatatcactgttacccggaacagtccgactggtcaggcaatgacaaccgatgcggaagccgctgtcagcgaagccctgcgcgacctggccttctggctgtaccgccagctggaaaacaagtacgactggctgacctcagacaccgctgtggatgaggcccttctcatcaacgaatataccttcaccgaagccggtctgcgcgccggctgacccgtcatcgttaaactatcattcaccgattttctgtgaggattttatcatgtcggacacactccccggaacaacgcttcccgacgacaacaaagacctcccctggtgggggctgccctgcgccgtgacaccttgttttggcgcccgtctggtgcaggagggtaaccggttgcattaccttgccgaccgcgccggtatcaggggccggttcagcaatgcggatgcataccatctggaccaggcttttccactgctgatgaaacaactggaactcatgctcaccagcggtgaactgaatccccgccatcagcataccgtcacgctgtatgcgaaagggctgacctgcgatgccgacaccctcgggtcctgtggttacgtttatctggctgtttatcctgcgaccgaaacggaaagtaaccctccggaatagtcttctgctccggcctggtgctttctccacgccacttttccatttcttatatctgcatatcaggaaaatcttcagtatgaaaacattacccgacacacacgtacgggcggcatcgcgctgcccgtctcccgtcaccatctggcagacactgctcacccaactgctggaccagcactatggcctcacgctgaatgacacaccgttcgctgatgaacgtgtgattgagcagcatattgaggcagggatttcactgtgtgacgcggtgaactttctcgttgaaaaatacgcgctggtacgtaccgaccagccgggattcagcgcaggagccccgtcgcagttaatcaacagcattgatattctccgggctcgcagggcgaccggcctgatgacccggaacaattacagaatggtaaataacattacccagggcaagcatccggaggcaaaacgatgaaactggccctgacgctggaagctgacagcgttaacgtacaggcactgaacatggggcgaattgtcgttgacgtcgatggtgttgagcttgccgaactgattaacgtggtctgcgataatggctactcccttcgtgttgttgatgaatctgaccggacctcaacagacagcacccccccctctgctgccctgagcggtatacgctgtagtaccgcgcatatcacggaaacagacaacgcctggctgtactcgctgtcgcatcagacgaatgacaccggcgaatcagaatggattcattttacaggtagcggatatctgttacgtaccgatgcgtggtcatacccggttctgcggcttaaacgcctggggctgtcaaaaacgttccgccgtctggttgtcacacttacccgacgttatggcgtcagtctcattcatctggatgccagcgctgaatgcctgccggatttacccactttcgactggtaacccggaaattcacaacatgaaatcattaaccacggaaacagcgctggatattctgattgcgtggctgcaggacaatattgactgcgaatcagggattatcttcgacaacgatgaggataaaacggattcagcagcactgctgccctgcattaaacaggccagggaagatatccgtaccctgcgccaacagcagcttctgcaacagaacaggtgagtcttactcaccagactttattccactgacgccagcctgaacagggctggcgttttcatttatctgcaaaaaggaatatcgattatgtctgatatcacagcctcccgtccggaagtggtcaacgggcatacggaagttatctgctcaaccagtatccaccacattctggctgtacgaaaaagtacactgctgcaaatcgacacacttatccggcaactggctgaaatctcagttctgacggaaagcattggaggtaaaaccacccgggactgggccatgaaacaggattttcgctgcggctgctggctcatggagaaacctgaaacggcaatgaaagccatcacccgcaaccttgaccgtgaaatctggcgtgacctgatgcaacgttccaggatgctttccttaatggatgcgcaggcccgtgatacatggtaccggtcactggagtacgataattttccggaaatcagcgaagcgaacattctgagcacatttaaacaactgcaccagaacaaggatgaggtgtttgagcggggagtgatcaacgtcttcaggggactgagctggaattataaaaccaactctccctgtaaatttggaagtaaaatcattatcaacaatctggtgagatgggaccggtggagatttcatcttatcaccggacaacagactgaccgactcgccgatctggaaagaatgctacatctgttcagcgacaaaccgattcccgacaaccgggaaaacatcactattcgtctggatggtcacatccagtccgttcagggtaaagagcgctatgaagacgaaatgttcagcatcagatactttaagaagggctccgcacacatcacgttcaggaaaccagaactggttgacaggctaaatgacataattgccaggcactatccaaatgtattagcagacaggtaatgtggccttgccccgctattaaacatgtcatatttttgctatcattgtgaaaatttttcggaggaaacatgactacaaaagaccgtattcagtcccgactgaaccgttcaaaacgttatgtgttcacccgggatgatttcagggatatcgctggctatgatcaggttggcagagctcttcgtacactggtaaacgaaggtaagttgatgaaagtgggctatggtgtttacaccaaagcccgtcgtaacatcatcactgggaaaatcatgcccgcagcgcctgggggctctgctgcagtaattacagaggccctggagcgcctgaatatcagataccgtctggcaggagcaacggaatgctacaataaaggtcagtccacacaaattcctgtatctctggggataaaaacaccttctcgatttaaaagagtgttaatagtagggaaaagtaaaatcaatgcctgaattaacatcattatttcctgacgttgccgatgcactggatattgaatctgtcgctatcgtcgaaaaagattattttgtggttgatcttttaagattattaaaagaaataaaaccagaaacacatactctcgtgtttgcaggaggtaccgcattatcaaaagcaggtatctcgctaaacagaatgtcagaagatattgatataaagctcgtgccaacagagaactttatgcaaaatggcagagacaagagaagaaaaattcgcaaggaaatcgtgcaaataatcacggatgttattcataattctgacattttcagcttggataatgaaaacgcccgtataacacgtgatgagtatcgttataacgaaatctcggtacgttatccccagacatttgcacaagtcccctgtcttcgtccatttattaagctggagttgatggaaagcactctgctggaacatccggaaagcagagatatttattcccttgtcacggagttaacgggtaaaggtacacctgtaacagcattcccctgtgccaccattttatccactcaggctgaaaagctcatctccatgatgcgaagaacagcagcacatcttcgtaatcccgaacaacaggatgatgagtttctggtacgtcacatttacgacaactactgcattgtcagggaaaaaggtgtgaatgttcctgtattgaaaaattttgttcagatatgtattcacgctatggtaaccagtacccacaattttgtagctcaccagttgatgaacttaagaaagggctggatgcactccgggattatcctgtacacaaattgcgctttcaacgatttgttaaaccgatggtatttggtaatacacagattaactgggaagaagcctattccagtttcagacaaacagcgctaagtgttctgaccagctaacaaacgcgttaagtacgattccacaattcagcatatcgaaccagaccaaatgattacagcaaagcacaaaaaagagggattatagcgtcaaaagaattcgaattgcacatgggggcctcattggtggcctcaaaaacaacaaatacaaaataatctatataaaacaatttgttatacaatcagtttcattccgattccgggcacca

SEQ ID NO: 111 - DNA, 19518 bp, Escherichia coli
ttatataaaataaacttgggtgcataacgccatcaggtcttaaacactcccgaatcatcaataaacatcccccgctagcaaaacacagttcagttcacataacatccctgttatcccacacatatctgctggccgaacgacgccagtgcgcgtacggaggcaagagcagccctgcacatggcagcgcttgtggtaacctggtttaatccggtgaaagaggcgttttacatgcatctgccagcacccggaaaaaccaaaaaagtggcgctggttgactgtatgcgtaaattgctgaccatcctgaacgcaatgctcagaaagaacgaagagtgaaatgaatcgtagcatcatgttgctccataatttttacgttcaagacagttgattatcggcgcatatgactcaaaaagagcctgatgattgcctcttttccataggctctttctctgaagtgaaggaaggcccggaagaaagcactcgctggcatacgtgactccagctcaaccggagataatcaccattgttatttttctatttaataataatctcctgaaaaatagatatagcaaaaatacaatccggccagatttaattccgcattcattaccagaaataatcaacaccacaactatcatatcactcaatagtcaccgctaaaattttattattttcctcttctttacatagaaattgtcaacctgtttattatgaatcacttaaataattaatcacaaaacaacatcaccattatttgcgtgttttatttattaataacatagtcatacgttctttttttacaaggaaataatcaattgataaattgtttttggcattaatagtcaagtaggaaacattttaataaatgataaaaatcctaaattccttgttcataatgtaggagtgtgttaaataggtgggcaaaatttggttccctttctcgcctgtaatattgcagcgtcttcgcacctccatgagacattgcgacttaataagaaggtgataagtcctgcatataagcatggactgaccatggttttatattcattaaaaattttgttacaacccattgatttagcataaataaattatagtgggttcaggtttgttgtgactgtggcattatttccgtgcaaaggagctgatatgtctgaaagacatttacctgatgaccagagcagtactatcgatccatatctaattacctctgttcgccagactctggcagaacaaagcgcagcattacaaaacttgtctaaacaactggattccgggcagtaccagcgtgtccttaatttgataatgaactgtaaagggcacgttattctttcgggaatgggtaaatcagggcatgtcggtcgtaaaatatcagcgacgctggcctctacgggtacgcctagtttctttattcatcctgcagaagctttccatggcgatctgggcatgattacgccttacgatcttctgatccttatttctgccagcggtgaaacggatgaaatcctcaagctagttccttcactgaaaaatttcggcaatcgaattatcgccattaccaataatggaaattccacgctggcgaaaaatgctgatgccgtgttggaactccacatggcgaatgaaacctgcccgaataatcttgcaccaacaacgtctaccacgctgacgatggcgatcggcgatgcgctggcgattgccatgatccaccaacgcaaatttatgccgaatgattttgcgcgctatcacccgggcggttcattaggtcgtcgcctgctgacccgcgttgctgatgtcatgcagcatgatgttcctgcggtacagctggatgcgtcatttaaaaccgtgattcaacgtatcaccagcggatgccagggaatggtgatggtagaagacgcagaaggtgggctagcgggcattatcaccgacggtgacctgcgtcgttttatggaaaaagagggttctctgacatccgctacggctgcgcagatgatgacacgtgaaccgctgacgctaccggaagacaccatgatcattgaagcggaagaaaaaatgcaaaagcaccgcgtctcaacgttattggtgaccaacaaggcaaataaagtcactggccttgtgcgcattttcgactaattaagcaacggggttcgagaggttagtctctcattgagtttgcgccccactgaaactttgataatcgttacatgttgataaaagtgaagtctgccgtatcctggatgcgtgctcgtctgtctgccatctcactggcagatatccaaaagcacctggcaaaaatcatcattctggcaccgatggcggtgctgctgatctatctggctatcttcagccagcctcgctatatgagcgagtcgaaagtcgccattaaacgctcggatgatttaaacagcggcagcctgaattttggtctgcttctgggtgcctctaaccccagttccgcagaagatgcgttgtatctgaaagagtacatcaactcgccggatatgctggcggcgctggataagcaactaaattttcgtgaagcgtttagccacagcgggctcgattttcttaatcatcttagcaaggatgaaaccgcagaaggcttcctgaagtactacaaggaccgtatcaacgtctcgtatgacgataaaaccggattactgaatattcagacgcagggctttagcccggagtttgcgcttaagtttaaccaaaccgtgctgaaagagtcagagcgctttatcaatgagatgtcacatcgcatcgcgcgtgaccagcttgcctttgcagaaacggagatggaaaaggcacgccagcgtctggacgccagcaaagcggaattgctctcttatcaggacaacaacaacgttctggacccacaggcacaggcacaggcggcgagcacgttagtgaatacgctgatgggccagaagatccagatggaagcggacctgcggaacttgctgacgtatctgcgtgaggacgccccgcaagttgtgagtgcgcgtaatgcgattcagtcattgcaggcacaaattgacgaagaaaaaagcaaaatcactgcgccacagggtgacaagctaaaccgtatggcagtggattttgaagaaatcaaatcaaaagtagagttcaacaccgagctgtacaaactgaccctgacctccattgaaaagacccgtgtagaagcggctcgtaagctcaaggtgctgtcagtgatcagttcgccacagttgccgcaggaatcgtcttttccaaatatcccttatttgatcgcctgctggttactggtgtgctgcttactgttcggcaccctgaaactgttgctggctgttattgaagatcaccgagactaacgctgtcgctgaatgagtttgtgatgaaattatttaaatcaattttactgattgccgcctgtcacgcggcgcaggccagcgcggtcattgatattaacgctgacccaaacctgacaggagccgcgccgcttaccggtattctgaacggacagaagtcggatacgcaaaacatgagcggcttcgacaataccccgccgcccgcaccgccggtggtaatgagccgtatgtttggtgctcaacttttcaacggcaccagcgcggatagcggtgcgacggtaggattcaaccctgactatattctgaatccgggtgatagcattcaggttcgcttgtggggtgcgttcacctttgatggtgcgttacaggttgatcccaaaggtaatattttcctgccgaacgttggtccggtgaaagttgctggcgtcagtaatagtcagctaaatgccctggtcacatccaaagtgaaggaagtataccagtccaacgtcaacgtctacgcctccttattacaggcgcagccagtaaaagtgtacgtgaccggatttgtgcgtaatcctggtctgtatggcggtgtgacgtctgattcgttactcaattatctgatcaaggctggcggcgttgatccagagcgcggaagttacgttgatattgtggtcaagcgcggtaaccgcgtgcgctccaacgttaacctgtacgacttcctgctgaacggcaaactggggctttcgcagttcgccgatggtgacaccatcatcgtcgggccgcgtcagcatactttcagcgttcagggcgatgtctttaacagctacgactttgagttccgcgaaagcagcattcccgtaacggaagcgttgagctgggcgcgccctaagcctggcgcgactcacattacgattatgcgtaaacaggggctgcaaaaacgcagcgaatactatccgatcagttctgcgccaggccgtatgttgcagaacggcgataccttaatcgtgagcactgaccgctatgctggcaccattcaggtgcgggttgaaggcgcacactccggtgaacatgccatggtactgccttatggttccactatgcgtgcagttctggaaaaagtccgcccgaacagcatgtcgcagatgaacgcagttcagctttatcgcccatcagtggctcagcgtcagaaagagatgctgaatctctcgctgcaaaagctggaggaagcatcactttctgcccagtcatccaccaaagaagaagccagcctgcgaatgcaggaagcacaactgatcagccgctttgtggcgaaagcacgcaccgtggttccgaaaggtgaagtgatcctcaacgaatccaatattgattctgttctgcttgaagatggcgacgtcatcaatattccggagaaaacatcgctggttatggttcatggcgaagtgctgttcccgaacgcggtgagctggcagaagggtatgaccaccgaggattacatcgagaaatgtggtggcctgacgcaaaaatcgggtaacgccagaattatcgtcattcgtcagaacggtgcagccgtcaacgcagaagatgtggattcactcaaaccgggcgatgagattatggttctgccgaaatatgaatcgaaaaatattgaagttacccgtggtatttccaccatcctctatcagctggcggtgggtgcaaaagtgattctgtctttgtaaggagttgaaatgagcaaagctgttattgtcatcccggctcgttatggctcatcgcgcctgccgggtaagccactgctcgatattgttggtaaaccgatgatccagcatgtttacgagcgtgcgttacaggtggtgggcgttgcggaagtttgggtggcaacagacgatcagcgtgttgaaaaggccgtgcaggcatttggcgggaaatccatcatgacgcgcaacgatcatgaatccggcaccgatcggctggtcgaggtgatgcataaagtcgaggcagatatcaacattaacctgcagggcgacgaaccaatgattcgcccacgggatgtaggaacgctgttacaaggaatgcgtgatgaccccgcgttgccagtggcaacgctatgccacgcgatttctgccgaagaagcgaccgagccaagcacggtaaaagtggtggtaaatacccgccaggatgcgctttattttagccgttcgccgattccctatccgcgtaatgctgaaaaagcgcgctacctgaaacacgttggtatttacgcttatcgtcgcgatgtgctgcaaaactacagccagttaccggagtccatgccagagcaggcagaatcactggagcagctacggttaatgaacgcggggatcaacattcgcacgtttgagattgccgcaaccggtccgggcgtcgacaccccagcatgcctggaaaaagtgcgcgccctgagggcacaggaactggctgaaaacgcatgattggcatttactcgcctggcatctggcgtattccgcatctggagaaatttctggcgcaaccatgccagaaactttctctgctgcgccctgttccgcaaaacgtcgatgctatcgccgtgtggggacatcgtcccagcgcggcgaaaccagtcgccatcgccaaagcagcgggaaaacccgtcattcgtctggaagatggatttgtgcgttcgctggatcttggcgtcaatggcgagccgccgctttctctggtggtggatgattgtggcatttactacgatgccagcaagccttcggcgctggagaaactggtacaggataaagccggaaatgcggcattggctgatcaggccagagaagcgatgcacaccatcgtgaccggggatttgtcgaaatataacctggcgcctgcatttgtggctgatgagtcagaacgtgcagacatcgttctggttgtcgatcagacatttaatgacatgtccgtgacgtatggcaatgctggcccgcatgagtttgctgccatgctggaagctgcgatggaggaaaatcctcaagccgaaatttgggtgaaggtgcatccggatgtcctggaaggaaagaaaacaggttatttcgctgatctgcgtgccacgcaacgagtacgtttgattgccgagaatgtcagcccgcagtcgctattgcgacacgtttcccgggtttacgtcgtgacatcccaatacggctttgaagccttgctggcaggaaaaccagtaacatgtttcggccagccctggtatgcaggctggggcttaaccgacgatcgccatccgcagtccgctttgttatctgcccgacgcggttctgccacgctggaagaactttttgccgctgcatacctgcgttactgtcgctatatcgacccgctcacgggggccgcaagcgatctgtttaccgtactgcaatggctgcaattacagcgcaaccatcagcaacagcgtaatggctatttatgggcgccaggcttaacgctgtggaagtcggcaatcctgaaacctttcttgtgtaccgcaacaaacagactgagttattcacgccgttgtactgcggcgacggcttgcgtggtatggggtgtaaagggagaacagcaatggctagccgaagcgcaacaaaaatcactgccgttatggcgaatggaagatggttttctgcgttcatccggacttggctctgaccttttgccgccgctatcgttggtactggataaacgcgggatctactatgacgccacgcgccccagcgacctggaagtcctgcttaatcacagccagttaacgctggcgcagcagatgcgagctgaaaaattacgccagcgactggttgaaagcaaactgagcaaatacaacctgggggccgatttctctctgcctgccgaggccaaagataaaaaaatcatcctggtgccgggtcaggtagaagacgatgcctcaattaaaacaggcactgtgtcgattaagagcaaccttgagttattacgcacagtacgcgagcgcaatccgcacgcttacattatttataaaccgcacccggatgtactggtggggaatcgcaagggcaatattccgacagaactaattgctgaactcgctgattatcaggcactggacgcagatattattcaatgcatccagcgcgcagatgaagtgcacaccatgacatcattgtccgggtttgaagcgttattacatggcaagcaagttcattgttacggcctgcccttctatgccggttggggtttaaccgttgatgaacatcattgcccgcgccgcgagcgcagattaacgatagcagacttgatctatcaggcgttgattgtttacccaacatatattcacccaacacggctacagcctattacggttgaggaagctgcggaatatttaatccagacgccgcgtaagccgatgtttattacccgaaaaaaagcggggcgggtaatacgctattaccgcaaattaattatgttctgcaaggtcagatttggctaaacaatttcatagttgactattacacagattatttatgcaaggcaacgcactaaccattttattatcgggtaaaaaatatctgctattgcagggaccgatgggaccttttttcaatgacgtcgccgaatggttagagtcattaggccgtaacgctgtgaatgttgtcttcaacggcggggatcgtttttactgccgccatcgacaatacctggcttactaccaaacgccgaaagagtttcccggatggttacgggctctccaccggcaatatgactttgataccatcctctgctttggtgactgccgcccattgcacaaagaagcaaaacgctgggcaaagtcgaaagggatccgctttctggcatttgaggaaggatatttacgcccgcaatttataaccgttgaagaaggcggagtgaacgcatattcctcgctaccgcgcgatccggatttttatcgtaagttgccagatatgcctgcgccgcacgttgagaacttaaaaccttcaacgatgaaacgcattggccatgcgatgtggtattacctgatgggctggcattaccgtcatgagttccctcgctaccgccaccacaaatcattttccccctggtatgaagcacgttgctgggttcgtgcgtactggcgcaagcaactttacaaggtaacacagcgcaaggtattgccgaggttaatgaatgagctggatcagcgttattatcttgccgttttgcaggtgtataacgatagccagattcgtaaccacagtaattataacgatgtgcgtgactatattaatgaagtcatgtactcattttcacgtaaagcgccgaaagaaagttatttggtgatcaaacatcatccgatggatcgtggtcacagactctatcgaccattaattaagcgattgagtaaggaatatggcttagatgagcgagtcatttatgtgcacgatctcccgatgccggaattattacgccatgcaaaagcggtagtgacgattaacagtacggcggggatctctgcgctgattcataacaaaccactcaaagtgatgggcaatgccctgtacgacatcaaaggcttgacgtatcaagggcatttgcaccagttctggcaggccgattttaaaccggacatgaaactgtttaagaagtttcgggggtatttattggtgaagacgcaggttaatgggggttattatggaggagtaaaatttgagaatgcattgggtatgaataaagattttttgtttggatcaaagtcaatatcataatttattctaaattatcaacgtagaataaaagcattaccttcaagaatccttatttttataactatatgactcataaaaatatattcctatatatttagttcatataattattttaccatataaacatatcacttttatataatgaaaactcgtctgatttcttattgagtaaattcatccagtagaataatgatcccttcacttctggaggttttatgatggtatctatcactataaatatacatactgtaaatagtattattcttgactatcactccctcattttcaattctagaaactgttaagcccatttttttgagaacattcatcatttcatttggatggaaaattttttcagataaaagctttccggaaaaatcaaaaactctaatgccttgatatgtattataagtactttccattttggaatagtaaaaggcaccataactagcaacaaaaaaaccatcacctaaagctatcccttgtcttttattataattctttgcatcaggactcgcatctgatacaatatatccagaataattattctgtaaataaattactcttaataaatctccacttactgaatatagttcaagtctatttctactatactttatacttctttcgctttcataaccttcaataagccaatagtcttgactcatcgaaaattggttaaaagcattaattgaaaaatctctttccttaaataatctgtcaccatacaagctactcaccatattatatctttgcaaggttcccgtattcgaaacgacatatacaacattaaacccattatagtcttgtataatagccaaaccttcgccagccccgcctcgcccaccacttggtatcttatagtacccaaggtaatttccttttttattataacaaactaatatattatccttttgttttggctcaaaaatatactgaatataaatattattatcatcatcaagagcaaatgaactagggtataaatattttgccccgtcatactgactgagtacatcatcgtactcattaaataataatggcagagtgatatgaatatcattatgtgaatagcttttacttaaaatagcagcgctacaaatttggatactgcaaatcaccgcaagtataaaaacagaatttaatcttaaagccatattatttaaacaaaatcatagatgccgttagatagttttattccagaaagagccatattaatcattgctacaatcatatgaattgattgtggcccaacatcaggatggcttttaattttatcattgatgctatttgcaactgttgaataagtgatgattggatttataatatccataatatatttgtactgttccgaattttgtgaaacaataaaataagacatattccccttatagtttattaaatagtcatcaatgacttttttgaataactcttcctttggctgaggaaaaactccctctattaaatgtagatcatttttattatttatataatgttcatcatttaatataggatccaccgctactattttataattattagttaatccatgataaacggctgccgtacctccttttgagcatccataaagtacgacatcatctgattttatttgacattgttcaataacttctaatataaggcttttaattttatcagcattggttggtaatgcatttgtatttaagtaaaatgagccagtaattcctccgatatcagccactcttaatatagaaacattttttccaatatatttatcaattgtagaaaagttttttgcaaaatatctgtacaagcttgcagaatatggttcaattggcatctgagagaaaacaatcagtagcttttcatttattttgcatgcagcccgttgtaacgtatatacaatcccatcagaattaatagaaaactttttttcttttactggaatccagaggttttttatctcatcaaagtgaaccaatgaagttacatttccacgatgaacgtacgacataaaaccagcattagttaaagcaattaattgtttttttaaattataatcatgatatgaaaactcaattaaatttttacatgaatcacctttcccaattatttcaaaatgaatatatttatacttggatgcctgcaacaataaactaatttcatctgtggttatattactgttaatatgtaaaactgtcttattcataattatttattaacttaactaaatttactttaatttgtaaggaggtatacctccttacaaatcaatcaatggttcttgacgatcatgatatagattaatgctttaatgaaggcatttttcataaaacatcgacaaagcatttttttgataagattcaatgtcaaaatgtttaaactccaaccttcccaagataaagtcccgcattccgttgaagagaccgtctacactattttcaactaatacaccagaacgcccttcaagagcacttctagaaccagtaatgtcagttgatattataggtttatctagaatcattgcttcgaaaagaaccataggttgcccttcatgatttgaagagaggacaaaacagtcagctctctttagcagtggaaaaggatttgatatgcgtcccagaagatgtacggatttttcaagtcctaaagttataatctggcgttgtaaatcaatcttgagggggccgtctccaagaattaataactcaatattaggatataatttttgtaatctgcaaaaggcattaatcaacttttgttgatctttttcgactgaaagtctgcccaaagttataaagtagattttatcattttcaaaaataaatccacttgtatcaatatcatcagattttttaatcacctcatctggattctgaacattatcacaataaataaacttatcatgctcaatattaaaaaattcgcttaagttatctctgttcaactccatcgttttttcagaaacagaaacaattttattgtaagatttataaaaatcaaaaacaactctaagatatggaaatctttctctccactcgctcaacttatcattatgttgaaatattattttatttctaactgtatctttcggagcattagcaaaccggataacccaagattgattataaccttcaaaatggattagatgatcaatatgactatagccaaagagccttaaaaactctcgttggtaagcatgatcaagaatatcatacatttccttacttgccagggtgaattgattatttaatttatcattaagccatttctcttcaatattataaagcatgtttccacaagttccaatgacttgaatatctggagagactctcttaaactgctcgaaccgttcttgaaaaccatgaattgattttgggtcaacaaccaaagaaatattatatttatcacgatcaattaccgatataagatttagccatgatgacaatataccatttggaataaatggaccaatataaaaaagtatatttttatttttgtttttattaagcaatatggatttttcttcaaagaagaaccattcaattacttttccacatacacttccatcatcatttttacaaaacttatcaatacctttagatgcatcgaaatatatttcattacgaagatatccacttaacgtgttaagtaactctacatcattaaaacaaacggttccaggtaattcatttagaggaaaatacaaccctctctcattattatattgctcaatatcatacgcatagtaaattactggtctattcattacaaaaaaatcgaaagcaatacttgaataatctgtgataagaatatcaatcgcccctagtaactcattcgtgtcaatctcagaaggaacaattgttataccagaaatattctgctcacttactaatttttcgatcatatgatgaccacggaaaacgatatgacaatcctggtcagccaacttttcaagatcgttctttagtttttctatatctaaagttgcctttccatgtattcctctccaagttggagcatacaagactactttatcgtaaacgttcgcattaattttcctacgtatatattccttccgttcagagctaagattaatagtccggtcaatgcgaggataacctaactctttaatttccccactaaatatattagatatatcatacctatctaataaaatattagttgtgtgtgtattaggactaagtaaatgtgttgtgtgaaggaaatttctagccacatttttatgtgctaaaaattcatctttaatatcttttccaagaaattttataggagttccatgccaagtatttaaatatcgctgccctttctttcttataaaatactcaggaaaactaacattatttatcaaaaattcacatgatgccaaacattgcatgtataaatcactttgccttgaaacaaaatatacattttttttattttttagctgctcagggatttttttttcattattgataacccaaatatgtctgaaattatcaaatcgttgatcatcaataatatctaaaaataatgcatatgggttacaagaaatacttgcaccatgaaagctttcataaagtatagtgtttttttcaattgataatgtttcataaaattcagtgtatgtagcattcctcctaaaagttaaattttttgttagaatatcatcaggagccccatacggtgttccaaaaatctctattttacgaaaaaaattacatgcctgttgataattcccatcgcggaataatgaatatccgattctataataatagtctttggtatatgtattgtttctcataataccttcatgatatgcaatgacagcatcattccaattacatgaagattcatatgttttacctaattcataccataatccataatttatgcatgaattagaaattgctgactctaaagtattaatcctgctttcatatttaagtttttttctgtaagagtttaaatgggtatcattgttatcaataacttttatttgtgatgcataaatttcctgagaagagtcatatgcttttatatacatttcacaggattgcctgtatttattagccttagcatatgcgtacccagatctatagtaccaaatcgagatatgtttgatattgctttgtgctgcaaattgataagcaacagcagcatcaagatacttttgacttctctctaaaacaaaccctagcctataatgccaataaggatgattttcatcgagtgataatgccttgcgataattctctgcggctttatcccattgataacatctatcataagataatccgagcctataatatagctctgcacataatggatttatggatgtatgtttttcatacgcatcaatagccttagcccagcgtcccttatattgatgaaatgctcctattccaaatttattactatttaattttttgtctaacgatatagctgtcgcatatgctattttagaactacggacattttctacattgtttgtttcatcagattcaagcgaatatccgagtgcataataccaaatagcatcatgttttttattaaattcaagtccttttttataatatatactagcctcattaaaacgccccatcttttctaatgcggtgccaagtttgaaataacgttcaggtattgaaggatctaattttattgcgtttttcagcgtatcaacttcctgccaccaacgcccttttttatgaagaacctcagcaagtctatcgtgtaattttggattattaaagtctgtattaagtttttcccttaataaatcttcttcagtagatgatttgctcaccatatgattatttaacttatcaagatgccttgcacactgttcgagttgttctttccactgtatatttgagggttccaattctaatgctttacttatatatttaaatgcctcttcatatctatgcaatttaagattgcatattcctgctttaaaatagctctccgcatgttttgttttttttatgattgatttctcaaagaacaataatgccttctcccattctttttttttgtatagagaaattccgttaatatattctttggattggcatatttttttagctaacttagttaacaacatactatgtccccatgattattttttaatatttaatatattcagttatatagacctcaaggcttagatataatacacccaagttcatttaatttatcttcataatatctaacgccttcaacactaccaattttcatgtttattattagctttttatacgcgtgtatttttaattcatacatattaactatttcatgattgggtgtatcgaatgcagagtcaaatttcattttttcttgcatccagtttccataattctcagtcaaatataaatcataattttctggtattaaaaacacgttcccaagaaaaccataagaaatcaaattaaatggagtattgttccatctcagctttgaacccgcatgccaatagctgtcatgatctcgataatgaaaaaatatgtcgattgccacaccattaacatgttttattctcaacgtatacggtgagcgcataggtgcaatatcaaacaagccagagcaagcaattttcgttgataatacggatagatttgtttcgctccatactcctatatcaatatctttgtcatgttttagtaattttttatcacgaatacaaccaagtaatgttccgctaactaaaaaaaactgtattttattagcatccaatattttttttagacctaataatgcaattttagcagcattaacagaaaagtttttattgctagtttttggtaagataaaagcctcagaatttatacttcccaacaatactttaacccgatttaatgcttcttcatatagtttagcccttaacgcagcaattataaggtaatcgttcacatcataatgatacttaagtatattcctataagaacattccctttcccaatgattcaataattcatcataatctttttttgtatcaaccaagttcgccaataatagccaagttttcaaacgatcagaaaaattaaaaacttgaatgagtacatccttcgcttctaatttatttccggttagtctataaacatcagccaacccataatagctatcagtatgtattgggtttaccttaattatctcttgatataatttcttagcaaatatataatcaccattaagaaatgaagccctagcaacaaaatatttagcgacactcccgccaaaaagtaaaatcaaccacttaaattttaaaatctctttcgaatgaccttttcttatcgcaattgttagcagcagataagatattatattaacaaataaaatacctttgaatttcttcgcattttttatagagttttttatctctgaatgaaatttcaaaatccctctccaaaattaaccatatcttttgatttgagaaattagttctgtcgttgaaataccaacagttcttggcagatatgatacttcacataattccttatattcatcaaatcgccctagccaatcatctcccatcactaagatatctgccttaaattttttaatatactcgccctttaattccaatgactcttcaataaaaacttcatctacaaattttaaggacctaattatttcaagacgctcagtttccggataaacaggatacctctgtttttttgagaaattcaaataatcggatgagacgccaactattagatagtcccccattttttttgccctttttaagatatttatatgacctatatgtaatacatcaaatgtaccaaaggtgataactttacgcatttttagctccactaaatgttcaaattttcatcattttgatataacttaattgcgtcattaatattctgataaagacaagtctgatgatctctaggtatgaatagcgccacatcacaaaactctttcaatgaattcaaactatgtgaaaccattaaaaagctagattctttatgcctttctttaaacaattgagcgcatttttctttaaacctggcatcaccgaccgccgttacttcatcgacgatataataatcaaacttaaatgccatgcttaaaccaaagcctaaacgcgatcgcatacctgatgagtaagttttaatcggcatatcgaagtacttgccaagttcggcaaattcttcaacaaactcaattttctctttcagttcttcttgcttcgcgtataaccgcgcaacaaattttacgttttcgcgtccggttaaacttccctgaaatccacctgcaaggccgactggccatgatattgttttattagtgatgatctttccactgtcggggcggtcaatgccaccaatcattctcagtaacgttgatttacccgcaccattacgaccaataaaggcaacactttttcctgaagggatttcgaggtttaaatccttaaacacataatgtcgacccgttggcgtgcgatatgacttcgtcaaattctcaatcttaatcatgatgtcagcattgcctcctcacgagttcgatataacgccagaccaatgaacagagttatcaatgtgaacattgccaggtagttcagactcacaccttcgctaatatagccaggcataacggcctcacggcttaactccacgacatgcactagtgggttccagagtagatatgaccagtattgctttggaattgagtgcagagggaacatgatgcaggagatgaaataaaggggcttaagaagtatcggcagaaccttttgcatttcggggaaggttttaccaacgaccatgaatattaagccgacgctgcatgaaagaatgatcagcagactccaggtagccacaagttgtaaaaaatttgttatctcgaaatattcgcctgccatcctgacaatgagcataagcagaatataaacagaaacgtaaatcagcgtctcaagcagggcgcgcgcaatgatcgtatcgatgggttttactgggcgataattaaacagcccctggttcgcttcaatagcacttacagaacgtttgctgatactgctaaagataaaaaagggaatcaggccattaagtaaaaacaccgggaacgagatgtctggcatcgtgcggtgcataatgtaaccaaaaatgcccaacagtatcagcaaatgcgcagagggttcgagaatcgcccacagatatcccagacggaacttaccaaagcgtgttcgtatttctcgtagaaataatgcctctacggtgactttctggacttcaaatccacttcttgccatttggtgatgtgatcctattctcttcaggtatgctaccgcccctggcttaacagctaccaatacactggaggtaatacttgtttgtaactggataaaatttagtcagacggtttgacctttttaatagccgcaaacaatttcagcagaaattatttccgcagggataaatagatctatttccgtctcgtttcttctaatccattcttcaggcatgaatgtattcggtcttctggtaatttcagaaaactggccgtttcagaatgttgagttaatttctcaggaaattatttctacttctttttgcttaaccaatatggcttgaaaaagatgtaaagcagcatgcgttctggattactccggaacacacttattcaaaacgggccgctaatttcgcaagaaattatttttcactattactgttaactacttgattataataccacccatgaattttatgcgtagtaacacctgtaatctatctcaaaccagaacgcatgcgattgattaccaataaattgtttagcaagaaactatttccctatttaaaattcactcatgtacttcttatttatatctacagcaccctctttacagtcacatttgtgatttacatcacatttaaacggtgttatttaacacccatcaataattccgcgagtaattatttttgtcgattaaaatatacatcttgattatttttgtgtgtttattttaaccagtgttacaaccaacaccatccctcagtagatatacctgagcagacatttcttaaaatcgacgaatagtttcactggaaattattatgcttatttgaaattccctttctgattatctccaggaattttactaacttccaggttacacaaaatacagatcacactagaattatcctatatgttttggcctatcaattgttactcaatgatttattacaactattaataatcataatgtgtcaaaacacttaagcaactttacagtctgagaaaggtgtcgattaacgaaggctacatggtgaaaaacaggttccttcagtgttaccgaatattccgtggtggtctggagggagataattcttgctacatcgaaactcagcccggtgagcgggtttgacagttccgcactcaccattgggctaagggttatcaggtggggttaaggaaatggcaatacc

SEQ ID NO: 112 - DNA, 2246 bp, Escherichia coli
tctgcttgcggggcacatcaggcagttcaacctgccagacgctgatccattcgccgggaatgtagagtcgaatcgcatcagtttgcagccattgctggagacattcatcagcaacgtcaggccagataccgtgctccacgtcgggtgtatggcgctgccaacggatgggatcagcggcgcaaagcgggaaaaaaatctcaagcatgaaactcactcactttctcctgtctgatgccagagaacagaaaagtgttgtgggcccatgcggacaattaacgaattcatcgtcagttcaatctcattcacggtgatatctgaacgcagccagaagtaattgctgtccacgctcaggacggtttttagctgttttttagtacgctcatcgacgtctgcaagtagcggctgtgcaagaaactgatcgacatcttcccagcccttcgccggacgttgttgtaataacgcccgcgcctgaacagggcttaaccacgggtcaaacagcgcctcaagaatcacactttgcgtgacatctaatgtattgatgttgatttgctggcgggccatcggcagcgcacagaccaacggtttcagtttttgataaagcccggcgtccattccctgtaccacgcgcgttccatcgggtgtgcgctaagctcttttcgttccccattgggacccccttttgatttcttgtttgacacttgcagttgccagaccgcaaggtgttttaacaaatcaaaaggggttttaataactggctcaaagctgaaagctttccggaacccccagcctagctgtaatgccagtcagttaagcaactgactggctctttttcggggctgtggggtatttccaggcctctcctttaccactctcgggaaggccctttcccttcttgtcggtaatttcacaagttgtcccatacttgcaagatcgcgcatcagctccggtatacgtcccggtgaagcgccctgcaatgtcatcagcattctcatcaccattccgcatgattctgagaaactcagttgattcggccagtaacctttcagatgttccgccattttaatcatctgatatctcaccagattataagccagtaagacaccccacagctcttgctccacaagctccggttttttacttctcagcgtcagcctgctcagttgcatcgtctgttttatctccctgtatcccagttcgatttcccagcgatgactgtacagttccgccatttctcctccggggaagcgcatggcgtccgtcatcgacgtcagcagatggcagacttttcctttgcgcgtcacggtcagcaggcgggctgtcacttcatttcccagtcccggccacttttttcgtgcctgcgggctggttttcagcttcaccagatgatcgcctttacccagttttctgatctcttcatattgcgctccctttctgagaggtatcatccagtggcggtgttctcccgccaggctccaggcatttaacagtcccagtgagtaataacctttatccattaacgtcagagtgttatcgccggtttgttctataagttgctcagcaagctcattttcgctgttcttcatcgtgccgaaggctgcagccgtcagcagatggctggtcagttccatctggcagaccattttgacctgcgggtagagcgccgggttcccggcatgtgtctggcgggggaaggctgcatcgttctctggtgtatccggtgtgcgccagaacacaccatcgatggccagcagggtcaggccgcaccagtgcggatgcggcgtggcgttatgccagagctgcgctgttttcgtgaacacgcggcggacagcctcacttcccaggcgctggcgggcctgaataacggcactgggggcaacgaaggggcgattgcccggcagcatgatgtccaggcgattcacaatctggtgaagaggttctttacgctcaagcgccatgccaacaatacaccagaccatcatttcgaggggaagacggcgcttgcgtagcgttacagtacctgattcggcaaggcaacgagagatgagttcggggtcgaggtaatcccccagagaagtcagtgggttacgcagagaatcgtaacgggataccagatcaagagcctgtccaatgtgcataaaaaaatccggaaacaagtgagcgtttccggattcttacacagccactggatcggtcaactgatccttaactgatcggcattacagcctagctgggggttttctgtgcac

SEQ ID NO: 113 - DNA, 7539 bp, Escherichia coli
  misc_feature (7349)..(7349): Unsure
ttactttttcaattttaatcatcagcagatcgcattccatagttctgttctgtgggtaacaaataattaacggtgacaaacaggttgcaacagcaacgaacggcaccttaataatcaacccaatgaatacaaacgacgaataaatagtatttattaatgattacgataaggtcagagactacacagaagcgccacaatgccttttgtcgatttaaggcgaccggacaaggcttcttcttaatatattcataaattaaatatcattcacaataaaaacaaaaaaactcaaactcattatttaaatcaatgttcattttcacactgatgaaaatactatctcatttatcttttatgcctatataatccaccgcattattgtcattttattttggatatccaattttttcgtggtgtatatgtctaataaaatctttacgcattccctacctatgcgctatgccgattttccaacgcttgttgatgctttggactacgccgctctgagtagcgccggaatgaatttttatgacagacgttgccaacttgaagatcaactggaatatcagacgttaaaagcacgtgccgaagctggtgcgaagcggttgttatcgctgaacctgaaaaaaggcgatcgcgtggcactgattgccgaaacaagtagcgagttcgtagaggctttttttgcctgccagtatgccggcttagtcgccgtcccgttggcgattccaatgggcgttggtcagcgggattcctggagcgccaaattgcagggtttactggcaagttgccagcccgcagccattatcactggtgatgagtggttgccactggtcaatgccgcgacgcatgacaaccccgaattacatgttttaagccacgcctggtttaaggcattaccggaagccgatgttgcgctccagcgtccagttccgaacgatatcgcctacctccagtacacctccggcagcacccgttttccccgtggcgtcattatcacccatcgcgaagtgatggctaatctacgtgctataagccacgacggcattaaattacgccctggcgaccgctgcgtctcctggctgcctttctaccatgatatgggactggtcggctttctcctgacccccgtcgccacgcagctttcagtagattatttgcgcactcaggattttgccatgcgtcctctgcaatggcttaaattgatcagtaaaaatcgcggcaccgtttccgttgcgccgccgtttggctatgaattgtgccagcgccgcgtgaatgaaaaagatctcgctgaactggatctttcctgctggcgcgtcgctggtattggtgcagaacccatctccgcagaacaactccatcaattcgctgaatgtttccgtcaggttaactttgacaataaaactttcatgccgtgctacggactggcagaaaatgcgctggctgtcagcttctctgatgaagcctccggggttgtggttaacgaagtggatcgcgacatcctcgaatatcagggtaaagccgtcgcgccgggtgcagagacacgcgccgtatcgactttcgtcaactgcggcaaagcgttgccggaacatggtattgaaatccgcaatgaagcaggtatgccggtcgcggaacgtgtggtaggccatatttgcatctccggtcccagtctgatgagcggttactttggcgaccaggtttcgcaagacgagattgccgcgacgggctggttagacaccggcgacctcggttatctgctggacggttatctgtatgtcaccggacgcattaaagatctgattattattcgtggccgtaatatctggccgcaggatattgaatatatagcggaacaggaaccggaaattcattctggcgatgcgattgcttttgttaccgcccaggaaaaaatcattttgcagatccagtgtcggatcagcgacgaagaacgtcgcgggcagcttatccacgcgctggcggcacggatccaaagcgaatttggcgtgaccgcggctatcgatctgttgccgccccacagtattccccgaacgtcctccggcaagcctgcccgtgcggaagcgaaaaaacgttatcagaaggcttatgctgccagtcttaatgtgcaggaatccctggcatgaatcaaactgtcgcggtgacgggcgctaccgggtttatcggtaaatatattatcgataacctgctcgcccgcggctttcacgttcgcgcattgacgcgtactgcccgcgctcacgtcaatgataatctcacctgggtgcgcggttcgctggaagatactcattcacttagcgagctggttgccggagccagcgtagtggtccattgcgccgggcaagtgcgcgggcacaaagaagagattttcacccgctgtaacgttgacggcagcctgcgcctgatgcaagcagcaaaagagagcggcttttgccaacgttttctgtttatctcttcgctggcggcgcgccatcccgagctctcctggtatgcaaaatccaaatacgtcgccgagcaacgactggcagcaatggcggacgaaattacgctgggcgtttttcgcccgacagccgtgtatggtcccggcgataaagagttaaaaccgctgtttgactggatgctgcgcggcctgctgccacgacttggtgcgccagatacacagctctcttttctgcacgtcaccgatttcgcgcaagcagtgggtcagtggttaagcgccgaaactgtacagacgcaaacctatgaattatgcgatggcgtcgccggcggctatgactggcaacgtgtccaacagcttgttgccgatgtccgctgtggttccgtgcgaatggttggcattcctctgccggtactcaccggccttgcggatatcagtaccgcgttgagtcgcctggcaggtaaagaacctatgctgacccgctcgaaaattcgtgaattaacccacgccgactggtcggcaagtaataaccgtatttctgaagatattaattggtttcccgggattagcctggaacacgcattacgcaacgggctattttgattgtcttgtttaaaggtgtgttaacgtttctatggtaaatcgtgaaatagtaatggattacatcctttcctgtttacaggatttggtcgaaaacggtgtggaaattaagcccgacagcgatctcgtcaacgatcttggcctggagtcgatcaaagtgatggatctcttaatgatgctggaagacagattcgatatttccattcctattaatattctgctggatgtcaaaacccctgcgcaattaatggaaactctacttccatggctggagaataaataatggggctatacgataaatatgcgcgccttgctggcgagcgcctgcaatttagtgacaacgggttaacaccgtttggcacctgtattgatgaagtgtattccgccaccgaaggccggatcggcaataaaaaagtgattctggccgggaccaataattatctcggtttaacctttaatcatgatgccatcagcgaaggtcaggccgcgttagcggcccaaggtaccggcaccaccggttctcgtatggcaaacggcagttatgcgccgcacctggcgttagagaaagagattgccgagtttttcaatcgccctaccgctatcgttttttcaaccggttataccgctaatttaggcgtcatcagcgcacttgccgaccataacgccgtggtgttactggatgccgacagccacgccagtatttatgacgcctgttctctcggtggcgcggaaattattcgtttccgccataacgatgctaaagatctggaacggcgcatggttcgcctcggtgaacgggcgaaagaggcgattatcatcgttgagggtatctacagcatgctcggtgacgttgcgccgttagcggaaattgttgatatcaaacgtcgtctcggtggttatttgattgtcgatgaagcgcattcgtttggcgtgttaggcgcaacggggcgcggactggctgaagctgtcggcgttgaagatgatgtggatattatcgttggcaccttcagtaaaagtctggcctcgattggcggttttgctgtcggttcggaagcgatggaagtgctgcgctacggcagccgcccgtatatttttaccgcctctccttctccgtcctgcattgcgaccgtgcgctcgtcgttaagaactattgccacacaaccagagctgcggcaaaagctgatggataatgccaaccatctgtatgacggtctgcaaaaactgggttatgagttaagttcacatattagcccggtagtgccggtaataatcggttcgaaagaggacggtttacgcatctggcgcgagcttatttcgctgggcgtttatgtgaatcttatcctgccacctgccgcgcctgcaggcatcacgctgctgcgctgtagcgtaaacgctgctcacagtcgtgagcaaatcgatgccatcattcaggcatttgctactctgaagcagtaatgtgagcccgccgtggtgttgcgccacggcgggtttaatgttgtctgtcataccaatacaccaggctcaacgccaccagcacaaacgctatcggtaaaccgagcgcggtaacaggtgcgctcaacgcaaatagcaatcccagattgaccatgatttgatagctgatccaggtgagtaagccaacgatgacacctacagcgagacggctacccatccctggcgagcgcggggcgctaaaggtaaacggcacagccagcaaaatcatcgccagggtcaggatgggttgccccagtttttcccacagtgcaaggcggtattcgctgctgggttgcccggtttcctgcaaataatggatgtaatgattaagctgacggacagaaaaagtattgcccggcattgataactcttcaagatccatactggtgaaggccgattgccaggcaagattatctaatgtttccagcgtttctttgccattcagccattttttatgattcacaccatgcaggatccacgttttgtcgtcttcaatggtggcactgcgtgcataaatgtaggattcgagcgagagatcgtcgcgataatgaaaaatctccacgcccaccggctggccctgctcgttcagcgatttcaccgtcacaaattcattaccacgcctggcccacagcatattgccggtaatgtcatcgtcctcccccaacgcggtggcggtcgatttgatttgcaacgcctgttgctgtaatggcgacgctacccactcatctatcgcgcctaacgaaacagtccacaatatccctgcaaccagcgccaccagtgcaatacggaagatagaaaaccccatgctgcgaatggcggtaagctcactgtttttcgataactgccccaggccgacaatccctcccaataaggcgataaatggcgaaagttcgaccagtgtgcgcggtaaggtcattagcaccaccagcaccgcctgagtccagcgataaccgcccgggctgacatcatccagttcgttaatcaggttgaaggtggtaaaaagcggcagcaatagccctgcggcggcggcaaaaccgagaaagagatgacggattaaatagcggctgaaaacattcatcgggaaaatttctgcagcaaagagaagtcgcgtgcgaccagcatcagcaggcccattagcatgagtccgggtactaaccacaaaccaggaatgaggggaatcgcgccgttagccaccagcgtacggcagacgtcaccgccataaaaaatggcaataaacagcaacgtcagtggcaataacgttgaaaatcgcccttgccgcggttttacccgacttaatgaaatggccagcagcgccatcaacaatgcggtcaggccacggctttgccgccattgcagttcggcatgatcggctggaaagacggagcgcgccagctccgtgaccgatttcgctttgcgtttgacgttagggctttgatccagcggattcagatgtaattgcagattacggtagatctgttcgttgtcatcacgcccctgatgatcgataagataggcagtgccgttgtgcaacataacggtcggtttctcgggtgatgggtcaaccacatcaaccgaacgggcgcggaaaatgcgggttcgattggcagtagaagtataaatcagcgcgtcagtcaggcgattattatcctgatcaaccgtctgcgaaaggatcattcgtccgttatcgttagtgttaaatttctttgcccgcaactggcgaacatccagctccgactgcgactgctgctccagttgataaatctgcgcataagcccacggacgaccatacatcgacagaagggtgacaaaaatacttagcggtatcgccagataaagaacggctttgtacaagcgtcccggactgccccccgccgcagagatagcggtaatttccgagtcggtatacatctgccctagcgtcacgccaactgacacatacagaccaacaggtaacaacatctccagtgcaatcagtactttgtagaaaacgatatccagcacaacatcaagagctaatgtcccatttgccgcttcggtcagataacgctgtgcggagtagctggcgaaaataaagatcagaaaaccgacgataatcagcaccagacggcgcgtaccacgcatgatgtagtgttcaaccagcttcatctcactaacgccctcaatcctttgagttttttattcattgatcagtttctgcgccaacgcaatgacatgatctacctcttccggcgtcaggctgccgtcctttgcccactgaatttgcccggctttattcagcaccagaatggttgaactctgctccggcaagcgccaggcaacgcgtccctgtccattgccgtcaataacgaattgcgcccacggatagcggcgtttatttttttcgattttgccaacaacaaaatagccagtaccaaagatggcatcatcggtgttcacaatggtggtgggctgaaaacgatcctgcggaaagtttgccgcttcaaccgctttaattaacagtgagttctttttcttcgccgacttacgcccggcgatatactgaataatgcggacttttcccgctaattgtgtgctgttccacttttggtagtgaatttcgtcgtcgctattcagaagcagctcgccgccttcctggatataaacaggggtaaccgttttgccagtgacgaaattgtgtgcctgcacacccggggctaagagcatgataatcaacgcaataatcaaacgagatgacatcattgctccggctatagcggaaaacgcgaaatcagcagctctaagcgctgacgaatatcgctatccagcgccaccnggtgcatcatacgactggcggttttccatrtcatccgccaccatgtcgtcgtgtttatctcccatcaggccattaatggcggcgaggaagcgggatatctgtaacgcctctttattttcaggatcaagcgatcttaaggtgtcgtaataagaaacctgctggctgatgatttttcgcacatcatgaaatt

SEQ ID NO: 114 - DNA, 6197 bp, Escherichia coli
  misc_feature (73)..(73): Unsure
  misc_feature (131)..(131): Unsure
  misc_feature (137)..(137): Unsure
  misc_feature (169)..(169): Unsure
  misc_feature (5684)..(5685): Unsure
aagttcaacccatttggggattttatcaaccagccccttttaccgattggaaacaagtggcaggcccaggggnaattggtttcttggagcctgagaggtgtgggtattttaccgggggggattacgggcantctgcnggcaatatgatttaaaatcaattcaatagttngggggccattgggggactcaacagggtagctttcgttaatactgaccagcgaggtatgtatatacgaaataccggatgaaatgagccgatcaaggagtttataagtatcctctatccgcagcccccctgttacagattcttcaggagatattctgtaaccgatagcaaagggctttgtcgcatattcatagactacattttttacttcctgtaatacggccagcgggaagcgcatacgtccttcaagatctcctccccatcggtcattacgctggttaaatagaggggagaagaaattctgcagaaggaatccgtgcgcaccatgaagttcaacgccatcaaaacctgctttaatcgccctttttgtgacatctccgaatgctctaatggtttcctgaatttcgttttcagtcatttccctgctttgtaccactctcttcataaagtcaccagattttacgcttgatgcgctggcactaataacatcgttatttggcacaagctccgggatggctttattaccggcgtggaaaatctgcaaaatagccggagcaccgccacttttggctgcagctgctaacttttcaaggctgttaatgaaacggtcgtcatacgcggcaaattcatgagtaaacccaatgccgcttggcgtgacataggtacatcctgttattactaaaccaacattttgtgagcgacgtttataaaattcgagttcttgctcagagatggttccatcaggattagctgaccaggttgtcataggagccataacgatacgattacgtagctttattttttctgtcagcataaaaggagaaaacaatgatgggtgtttatttgtcataacaatacctcaaatgtttatctgattttaatgcgtataatcttaataagttgagttgctgctttttgatgcttttttctttaatagaattctttttgagtaatttcattattgtcgtgtagtcaataaaggataaatgtcagggagataatgaatctccctgcaaggttattacaaatgtgttttgtaaaaaggaattaatttatcgagcgcctgtttcacaggttctggcttatcatacaggtcgtaatgtgaataaccttcaaccacgaccagttctttatgttttgaggctgcacgaccaataatttcgcagccgtcacgataggcaccaaaagcgcccactctatcgcccactacaaccattagtggttgagttaacaggacttctgcaagatgaaaagcatcccagcccacggcaacagtctgatgtgaaaatagcgaacgatttaccccattaggcgcacagcctcgtggcgaacgataatattctgttgcttcaaaaaggtctatttctgttaatcccgcttcaagagctgcttccggagaagaagggagcaaatcatctacgcgaagttttgcgccgttagcttcgtctgttctttgttgcgccattgcttcgagtgctccgataggattaaacgctgtaaatccctcacgcataagacgcccgtagtttgcacccgtgacagtaccaatggctttaatccgacgttctgtcattgcggcattaatggcatatccacctccaccacaaatacccagtacaccaatacgcccggcatcaacgtaaggtaaggtggtaaggtaatcaacgacaatgctgaagtcttttactcgcattgttggatcttccagataacgcggttctccaccgctgcttccctgaaaactggcatcaaaagcaatgacgataaagccagcttttgccagggcggcaccatacacactacccgatgtctgttctttgcagcttccaattggatgggcactgataatggcaggatactttttttcactattaaaatcgtcagggaaatagatatcagcagctatatcccagtaagtgtgttttatcgaaacagttttcatttcaagctccagggatttgcctaaacagatttaaatatcatttctattatccgcaactggcattcgtgttcatatcgcgaacggcgtaatagtatgacttgtattggttatcatcaatggtctaatatctatcacagtgttaagttaaggtttacaatgatgaaaatagagccttcaattttgccttctcttgcctggtttgcgctgattgttcgtgccggcagtttttccagagcagcctctgaaatgggtattacgcgggccgcattgtcccagaatttaaaatctcttgaggaacgtcttaacaccaagctgatataccgtacgacccgcaatatgtcgcttactgaggaaggacagcatctgtatgaagtgctggtgtcggctttggggcaaattgatgatgcgttgaaagatgtcggtgatacccaacttgaacctacaggactgttgagaataaattcctcccgtgttgcagcaaggatgcttgttgaacctcatattggcgagtttcttactcgttaccccaaaacaaagatagaactcattatggatgacggtttatctaacattattgcggacggctgtgatgtgggcatacgtcttgagcaaggactggatgagcatatgactgccgttcctgtttctccgcttattaaactggttactgtggcatcgccagattatttaaaagaacacggtattcctgaaactcctcaggaattgagtaaccataattgtcttcggttgcggcataaaagtagcggtgcactctcagcatgggagttttcgaatgttgtggggggtaatgaagagttcgaaatagaggtgtcaggtaagtatatttctaatgatgacgaaagcatgatacgaatggcgctgaatggaacgggtatcattcaacatctggattttgcaatcgctgaacatatcaatgcgggcaagttacagccgattcttgaggattgggccgtttcatttcctggattttatatatatgtttcatcacgggtgagaatgccctctaaagttcgtgcttttattgattttatggtggagaaaagagtaaaaatagaaagttaatgatgtgtgtcagaatatcggtaagaagaatggcgcaatcgtgaggatacgtttattcataataaatctcctgaaagtttagaattattttcgatacagccagattatcattgttactaataatgtggttaaaataatagcatctatgccccccttcatgagtgtctgtgaagaggatgcttctacaaggaaatcgccaatgctcaaagaaaacttcaacgaactgcaaatctttcttgtggtggcaagagagcgaagttttaccaaagcagcgggcaaactcggcgtctctcagtctgcacttagccatgcaatgaaggctctggaggaaaggctcaatatccgcctcctgacacggactacccgcagtgtggctcccacagaagcgggggagagaatcattgcctgccttgaaccgcgtattgacgagcttgaacaggaactggaatcacttattcaattgaacggcatgccctccgggaatattcggttatctgccggggaacatgccgcgcgaagtctggtctggccgaagctaaaaccttttctcagagagtatcccgaaatcaatgtcgaactggtggtggataatggttttgtcgatattgttgaaggccgttttgatgccgggatacgactgggtgaaaatgttgataaagatatggttgcagtcaggattggaccagatatgcggatggctgtggtgggagctccggcgtattttgctgcaaaccctgcgcctgaaacgcctcatgagctacaaaatcatcgctgcatcaacatgcgtttgccaactgccggtgggctttaccactgggagttcgagcgagaagggaaaccgcttcgcgttaaggttgatgggcaactgacgtgtagtccattgccagaaagaattgatgccgcgttatcagggtttgggatcgcttgtgtccctgaagacatggttcaggagtatatagagtcaggcaagcttattcaggtgttacaggagtggtgtccaacttttcctgggtattatctttactaccccagccgcaagcagcatccgccagcttttgcgttgttgatcgatgcgcttcgctacaccgaataacgggtcctttatcctggacccgtttgggtattagcggcctacgcgtgcctgatgttcaggcgagtaacgttcaccgacgattttaattgtttccagcgcctcgcttatctgctgcgtatctttctgcgaaagaacaatgtcagcagcggccaggttttcttccagccggtgcagtttagtggtgccagggatgggaacaatccacggcttttgtgctaatagccatgccagtgcgatttgtgcagacgttacccctttctccgcagccagttcacctaacaaggtgaccagtttttcattggcttcaatggcttgtgctgcgaaacgcggtacggtgctgcggtaatcatctttgccgaaagtggttcccggcttaatcgcccctgtcaggaaacctttacctagtgggctgaaggggacaaaaccaattcccagttcctcaagcaacggcagaatttcctgttcaggctcacgccaccacatggaatattcgctttgcagggcggtgacaggttgtaccgcatgtgcacgacgaatggtttgtgctcctgcttcagacaggccgaaatgtttgaccttaccttctgcgatgaggtctttcaccgttcctgcaacatcttcaataggaacatctggatcaacacggtgttgatacagcaggtcaataacatctgttttcagacgacgtaatgatccttcaacggcttcacggatatgttccggacggctgtttaaaatctgctgcttattatcattgccgaaggtaaaaccgaatttagtggcaattaccacgcggtcacgaaacggttttaaggcttcgccgaccacttcttcattcagatacggaccatacacttcggcggtatcgaagaaggtgacgccacgttcaaccgcagcacgaataagttcgatagcctgacgggtatcggtcgccgggccgtagccgtggcttaagcccatgcaaccgagcccaagggcggagacttcgagtccggatttacccagataacgtttttgcattgaatgaatacctcttttatcgcggcttaaacatcaagtttgcggccagtcagccattccaccattgcgggatcgcggtgagagaagaacgcgctggttgcggtatccagggcggtaatttgcagcatatcttcagggctgagttcaaaatcgagaatgttgatgttctcttccatgcgttcttttcgcactgattttgccagtgaaacaatgcctcgttggtagatccagcgcagaacaacctggcccacgcttttgccatacttctcgccaattgccgtgagaacaggatgctggaacagaccatttttcccttccgcaaacggtgcccaggcttctggctgaatgccacgactttgcatccagggaacggcctgtanntgctgattgaaagggttaacttcaacctggtttaccgccggaacgacgttattaaaagcgataaggtctgccagtcggtcaggatggaagttactgacgccaatagcgccgaattttaccggcctgttgcagctcttccatggcacgccaggctccgtggacatcgccatatggctggtgaatcaagtacaggtcaacgtaatcaagttgcagtcgattcagagagcgttcgaactgggctttggccccttcgtaactggtatcctgcaaccagagtttcgtggtgacaaagagttcgttacgggcgataccgctttgtttcagtgcgttcccgacctggatttcattttgataagaggcggcggtgtcaatcagtcgataaccgctgttaatagcgtcaatgaccgctctttcgcattcggmggcatcggtcatctgaaatacaccaaagcccaacaggggcatttsaataccgttgttcagttttactttttgcatggtgttatccttcc

SEQ ID NO: 115 - DNA, 3696 bp, Escherichia coli
ctgaccctgagtgccgggcataagcagggcaagagtggtgagaatgacactcgctttggcctggaagttaattatcggattggcgaacctctggaaaaacaactcgatacagacagcattcgcgagcgtcgaatgctggcaggcagccgctatgacctggttgagcgtaataacaatatcgttcttgagtatcgcaaatctgaagtgatccgtattgctctgcctgagcgtattgaaggcaagggcggccagacggtttccctggggcttgtggtcagcaaagcaactcacggtctgaaaaatgtgcaatgggaagcgccgtctttgctggccgcaggcggaaaaattacggggcagggcaatcagtggcaagtgacgctcccggcttatcaggcaggcaaagacaattattatgcgatttcagcgattgcctacgataacaaaggcaatgcctcgaaacgtgtgcagacagaagtggttattagcggagctggtatgagcgccgatcgtacggcgttaacgcttgacggtcagagccgtattcaaatgcttgctaacggtaatgagcaaaagccgttggtgctgtctctgcgcgacgccgaggggcagccagtcacgggcatgaaagatcagatcaagactgaactaaccttcaaaccggctggaaatattgtgactcgtaccctgaaggccactaaatcacaggcaaagccaacactgggtgagttcaccgaaactgaagcaggggtgtatcagtctgtctttactaccggaacgcagtcaggtgaggcaacgattactgttagcgttgatgacatgagcaaaactgtcactgcagaactgcgggccacgatgatggatgtggcaaactccaccctgagcgctaacgagccgtcaggtgatgtggttgctgatggtcagcaagcctacacgctgacactgacagcggtggactccgagggtaatccggtgacgggagaagccagccgcctgcgacttgttccgcaagacactaatggtgtaaccgttggtgccatttcggaaataaaaccaggggtttacagcgccacggtttcttcgacccgtgccggaaacgttgttgtgcgtgccttcagcgagcagtatcagctgggcacattacaacaaacgctgaagtttgttgccgggccgcttgatgcagcacattcgtccatcacactgaatcctgataaaccggtggttggcggtacagttacggcaatctggacggcaaaagatgctaatgacaaccctgtaactggcctcaatccggatgcaccgtcattatcgggcgcagctgctgctggttctacggcatcaggctggacggataatggcgacgggacctggactgcgcagatttctctcggcactacggcgggtgaattagacgttatgccgaagctcaatgggcaggacgcggcagcaaatgcggcaaaagtaaccgtggtggctgatgcattatcttcaaaccagtcgaaagtctctgtcgcagaagatcacgtaaaagccggtgaaagcacaaccgtaacgctggtggcgaaagatgcgcatggcaacgctatcagtggtctttcgttgtcggcaagtttgacggggaccgcctctgaaggggcgaccgtttccagttggaccgaaaaaggtgacggttcctatgttgctacgttaactacaggcggaaagacgggcgagcttcgtgtcatgccgctcttcaacggccagcctgcagccaccgaagccgcgcagctgactgttattgccggagagatgtcatcagcgaactctacgcttgttgcggacaataaaactccaacggttaaaacgacgacggaactcaccttcaccgtgaaggatgcgtacgggaatccggtcaccgggctgaagccagatgcaccagtgtttagtggtgccgccagcacggggagtgagcgtccttcagcaggaaactggacagagaaaggtaatggggtctacgtgtcgaccttaacgctgggatctgccgcgggtcagttgtctgtgatgccgcgagtgaacggccaaaatgccgttgctcagccactggtgctgaatgttgcaggtgacgcatctaaggctgagattcgtgatatgacagtgaaggttaataaccaactggctaatggacagtctgctaaccagataaccctgaccgtcgtggacagctatggtaacccgttgcaggggcaagaagttacgctgactttaccgcagggtgtgaccagcaagacggggaatacagtaacaaccaatgcggcagggaaagtggacattgagcttatgtcaacggttgcaggggaacttgagatcgaggcctcggtgaaaaactctcagaagacggtcaaggtgaaattcaaggcggatttcagtaccggtcaggcgagcctggaggtagacgccgctgctcaaaaagtggcaaacggcaaagatgcctttacgctgacggcaacggttaaggatcaatacggcaaccttcttcctggcgctgtggtcgtctttaatctgcctcggggcgtcaaaccgcttgcagacggtaatatcatggtgaacgccgacaaggagggtaaagcggaactgaaagtggtttccgtgactgccggaacctatgagatcacggcgtcagcaggaaatgaccagccttcgaatgcgcagtctgtaacgtttgtggctgataagactacggcgaccatctccagtattgaggtgattggcaaccgtgcagtggcggacggcaaaaccaaacagacgtataaagttacggtgactgatgccaataacaacctgctgaaagatagcgaagtgacgctgactgccagcccggaaaatttagttctgactcccaatgggacggcgacaacgaatgagcaagggcaggctattttcaccgccacgaccactgtcgcagcgacatatacactcacggcgaaagtggaacaggccgacggtcaggaatcgacgaaaactgccgaatctaaattcgtcgcggatgataaaaacgcggtgctcgctgcatctccagagcgtgtagattctctggtggcggacgggaagactactgcaacactgacggttactctgatgtcgggtgtcaaccccgtaggaggaaccatgtgggtcgacattgaggctccggaaggggtgacagaggcggattatcagttcctgccgtcgaaaaatgaccatttcgcgagcgggaaaatcacgcgtacatttagtaccaacaagccaggtacatacacattcacattcaactctttgacatatggagggtatgaaatgaaaccagtgactgtgacaattaacgccgttcctgcagatactgaaggcgctgaggagaaataaaaacgacgatgtaataaataataatggcgttgacatgcgcagcgccattatttactgaatacctaccctggcaccgattagacggtggcagggtagggtaaatcttatgtgatggagttacaggctaaaccgggcgaacggggataaaaatttcgcaaacaatgttattgctatcaatttcgacgaagttttcattgtaataaaatcgctcaatatcactgccgttcactctggctaaccccctggcaggtaattccatcagatagaggtttcgcgcccattcagggtagtgctcccactcaccttcatagcggaaagaga

SEQ ID NO: 116 - DNA, 589 bp, Escherichia coli
taagtaacaatctgaaaatgccgatgatgggatttggtgtttttcaggttaccgataaagacgtgtgcaaacagtcagtgttgaatgctatccgcacgggttatcgactcatcgacactgcagcggtatacggtaatgaagatgccgtcggtgaagccgttcgtgaagccatatctgaaggtttatgtacccgagaagagttatttataacgtctaaattgtgggtgcaggatatgttgaatcaggatattgcagcagcaggtattgaagcatcattaaaaaaatcggggctagaatgcttcgatctctatttattgcaccaggccatgcgcgattattttagtgcgtggcgtgcactcgaagatgcctatgaagagggcaaattaaaagcgattggggtttccaatttctaccctcatgttctggcgaacttttgtgaaacggtaagagttaaaccgatggtcaaccaggtcgagttgcatccctattttgcccaaccagaggcgctggcaaccatgaagtattataacgtgcagcctgaagcatgggctccgttaggtggtggacgacataaaccctttgaaaataa

SEQ ID NO: 117 - DNA, 100 bp, Escherichia coli
ggtcattctgcgttggaatattcaacggggagtggtcgttattccgaaatcgacacatcaacagcgtatcgaagaaaattttgctatttgggatttctca

SEQ ID NO: 118 - DNA, 5999 bp, Escherichia coli
atttatagcctgcaggcagcatactgctgcctgcagggggtataacagtcgacaggggaaccgactgctttattcttaccaggtcacattgataccaactacaccctgtagcgggttctcaatgtcgtcacctttggtgtagtcaaggcttgcatatgctcccatgtttttggtgatatcagcttgtacacctgcacccacgcggaatgctgcaccgtcaatgctggcattgacagactcatcacccagacggactttgttgccatcagagaattcgttcagtgcggccagattcagataaggtttaacggtcgcgttgcccacagcgaagtcataacccacgcgcgtaccggcctcacccagcacagagttatagctgtcagaatgaacgtccacgccgttgagttgataatccacaccttccagagtcagagcagacagtttggcatatggctgaataaacaggccattaccgtctttccatgtgtaaccgcctttaaccatcgcaccaaaaccattggtgttaaagtcagctttgatggtaccgccaccattcatcaggcgaacatctgccgtgttgctgtagtgaccaaactgtgcagcagtatcaatgaagataccgttgttatactggcggctcaggtaagcgtggaagctgtaaccttcagtgtcacctttgctctgcatggtagtcatgtcacctttcgcagaagacatcgccacaccggccagccagctaccatcttcagtcatgaagcgggtatcaccacccagcattacaccatttacatccaggtcataggatgcatttcccgcggtggtatgtttctgtttaccgccaaagtactgaatccatacgccacccttgtcattttcgctcagacggacagcatcctgacgggcggagagcgtgtcagcctgcagattagcgacgttagccggagcagctgccattgcctgaatcacggagctggcgttggatgctttatgcgtgttttttacgaaataaaagttaccatcagctccctgtgtcaggtcatattgatacagaccaccttccgttgtgcctgtggcttttagagtgctgtctttgccggtagaaataaatgccgtttgttcattgataagatccaatgaacccgcactgtaaacacgcaagtcaccgctcgctttaccgctgatatccagagtgttttcagaagaggcatcaacaatcagagtgccgttttgagaagcaaacgtgccagtattgactgtagccttcgtgatattaaccgtactgtcttttactgccagagcatcaacagttgaggaacccgtaacattccagacagacccgttttgcagagatacactggcatctcctgcccctgaaactttgcctttccagactgaactatcggaaagatttatatccagatcactacccgctttatcgccgctattgaaggtataagcattaccttcccagtaagagcgggcaacgttcatatttacatttgttgtggtactggctgaattctcgctttcagaaagggccaggacatcagagtagatggttgaatcagcaacagacaaatttaaattttgcgttgctgaacctgcgccttgtgccgaagcagaggcataaattgtttgtttattattagccgccccaattactgagccatccttaatattcaggttgactgtatgaattcccgtcttattcccggcagtaactattgtttcaatcccgccattaataatatttgagtcagcaagggtgatgttgtcggttgcatcaccgtcaaaaccctgcaacaaattacccttttgagcaaaaattgccgtagagccgttgctgtaactcttattaccttgagcatttatggttgtaccattgagcgttaaattatttcccgtggtcgcttccagagatatccctgtcgcactacctttttcattttttgcaacgaaattaccgccattaacaacaacatcgccagttgaatcaatgaccattgcagtccggacataggtgccttcaccttgagctgtgatggtggagtctgtagcattaatcacaacatttttgttaccactaacttttacaccttcaacgaaatcttggtttaccgttgatgcggcggtaatatcgtgaccgccaaaagtaacattaaggtctttatctgaatctgacgtttcaattgttacggctgtaatcttgttatcaccgttaataacaacatcttgatccagagtcgtcttctctgtattcagcgtaaccggatcagttgataccgtgctatcagtagcgaatgctggtgcagaaagagccataacaatagctgtcgctaatgcgctgcggtaaaataccttactgtttttcatgaagaaattctccattctggtaactaatttcaatttcccacttatttatatttatgcagagataaagcctgcgtccctgcatttaccaccacggaatacctgttggtatttccgttttcacgcaatgtcatggcattcgttgtttccaatgcatttccatcaccgtgaaaattattgctgctcagcagcagggcttcccgcaatgacatgctgtccggtattccccaacgcttttttagcgactgctcggcaagccatatctgtcttatccccgttttgagaaactgcgcactgtattcccagctgtgtccggcaagaagtaacgacaacaccttcttttgcttttccgggaagcgttctgacatgacgattgtctttgtgcagttattcacctctttcataaagacagagtaactgtccataactggcaaaatttctgcatgcttcagccctgaaaacccaccagaggcatttgcaatactgatgacacgctctactgacattcctggtttcagtaacctcaggtttttgagaacgccagaaatactcacatccggtggcagaaaaaagggcgcgacgcacaacaccaccacgaatgagtgatcccgataaaatcggaaccacatttcagcgcattcggcaggtcgccctgccgatatcacgacactctgtggcctgtgcccgcaatttattgcgtaactcctcttctgttctgatgcaggtaacattgccgacagaaccggttgatagagctgcgaactgcgctggtacaattcctgagggacagaaaagaacgaaacgcatccttccctcacagatgtcagtacgccagcacgctgtacaggctgtacagcgtgcctcccaatcctgcagcccagaacagtagaaatattttggctcctacactgtagcgagtccgtatgcgccgcagtgggtggtagtaacaacgctgctgtgtcataacaatcctggtctttttttagatatattttttctttgtccggaaagtacttttccggaaatggcgtcagaatttattgattcaccaacggcaactttctctggataaaggattccggataccatgttctgcacatactgagtgagtcgatgagcggaatgttgtccgatatattttgcatgtagccgtatattccgtttcactctgctgtcaccgcatcccgtatagagcagcctgaaatcgctcagtgttcccagtccaagtttcattaaagcccgtgtggcaatcgcatgcagggtctttgaactgcgttgttcataacgggcaatctcactgaaactcataccctgcatcagaatcttaagcacgctcaactcccgtgcagtcaggagccagaaatcgctcatatcgccgggcaaaggacgcagtaaccagcggataatttgattctgataacgactcgctgtcagcatggtgccgatgcgtgggaagccgttatacagacttgcagcaggagcattatcgaaccagtcggagtcaccggtcaggcagacctgccattgcccggcatcactccgcaaacgggcgagacaagccagaagaaccaactcccctgaaggaagcgaagggatatcagctaacaggtagccacaggaggtctttaaaacgaattcaacctctgtagtgacgttgctgtacacccgcacgatatacctgtccgttgggatgagagactccagtgccaacctggtgaactgacaggcactgataataaccagaggcttcttcattcagactcgtccacgccattgctacaaaacctgacattttgattcaaaatgtcaggtttggtttaatagcctgaatatttaattttcttggaatataaatctaatttgtttggtttttattgtttttaattttgtgttatttaacaatatgggcgaaagttaatcactggtatgacctttgtgattaatcattttaaatcatggggttattttaatttagctagaaatatcaacatgttatgtgttttatttaattgaatgggctgtttttttatggaagaattgaggaaaacgtaggaatctgacattttgaatcagaaggtactgttttaacgaggcttttttttccacacccctttaaaacgagcagcattactggctgtgtatctgacagtatgctgaatatttcgatgacccagataatcctgaagtagtcgggtatcgacaccattgtcagccagagcaaaaccacaggcatgacgtaacatatgaggatgtgcttttacagctaatcctgcacgttttccagcctcacgaatgatagaaaaaaaatgttgtctgctgatagggcggcgtttccgggagagaaaaagccagtctccttcaactccgttttcaattaacttcctctgcttaagccacaacttgatcaaattatattcatcaggaagaagaggatgtgttgtcgagaaaccatttttaatacgccgaatattaagttgttttccagatgcatcaatatcggataaacgtaaatcaagaagttcactggccctaaaaccgtgaatgaaagccatcataatcagacagcgatttctttcaggaaaggacatgctctgggctgcatccatcagcctgtagacttcatcctgtgtgagatattttctcgtcatacgccaccgtgtacagttgtaaaaaaaagagaggcacacccagataagtatgcctgcaatcagaacgttatcgatgtaatctcattatctcattaataagattttttgaatagtagttctacgcaacagattaaatatgaactatttattgtgcagcttttctacaagtcatttttaatgcgtgtttttatctactataatgtgaaaaaataaatattaaaactatgagtgacaggtcgtgtgggatgtgtattacgtctaacgttttagtaattttttattagttatgagatatttaacatcatttcctgtgagattgtcttgttgtgtatccaattgattttacttttgttttttttgatgcataaatttggaggatagaaagtaagattagcttaatatcaatgatatgaatttgtaaatacatattgttgcaaggtgttctttacttttttggtcgtgagtaaatcattgttaatgggttctactcataaattaaaaatattcatttaaatgatttttactttttgtatatctcaatttgtttattttgcattcatttgatggagagtattccaacactttttatttttcgcaaaaaacttattaacaactttttattatcaattgaaaattaatgtaaactaaaatgttagcgaagcgataatcttgtgctaaaaaatatttaagcatgatgattaattaaagaagagtaaaaataaatcactgctaataaattatacgaatcgtgtttaaagctccatgtggttttggtctgacttatttttgtactcgttacaagaacccttttcgtatatgctaaccgtgagcgggaatgaacaggtaaccatagccaggaacattagcggcgtaattcttaagctgagtggtatttcatctgtagtttatctgtgtatgcatagcaccttcatcagccagattgagcaagtcagcttagaatttgctggcgagattgtcacg

SEQ ID NO: 119 - DNA, 62 bp, Escherichia coli
gcggggctgacgccgaagtgagatttaaaatgctgacgccaggtcacaggtgagagaaaacc

SEQ ID NO: 120 - DNA, 107 bp, Escherichia coli
  misc_feature (96)..(96): Unsure
  misc_feature (103)..(103): Unsure
gtgkaagaaaacgggtggtgcgctgcataagctttgcctgcgttckcgaccgcacacacaggtagtttgcagacgacagactacactcgccgactntgggtgnaagc

SEQ ID NO: 121 - DNA, 143 bp, Escherichia coli
atacacttcatccttcaaactgcctcttcgttggctgccttcactcaccccagtcacttacttaatgtaagctcctggggactcattcagttgccatctcgatgcatcttgaatgattttgtgtatagattatgtcatccatc

SEQ ID NO: 122 - DNA, 53 bp, Escherichia coli
caagccgccgcagatctgctctcgggcaggtctgctcatcctcctcaggcaat

SEQ ID NO: 123 - DNA, 403 bp, Escherichia coli
attgttgcacttgtgcacagtgcttgtgtgcattacaatgattaaataatggacaaggagatgagagaggaatggctcaaaagaaaaaatataaggagttttcgtgatgcctggttggctgattttttgtccattcaacgccacatcgaaagatccctgctgaaatccataccacgttatcacgaaagttggacatcattaatgctgccacttctcatcgggatttacgctcccctccggggaaccgatacgaagagttatccgggaaattacaggaatactcctccattagagtgaataaacagtaccgactgatttttaaatgggttaatggcaaggccgaagaattgtttttagacccacacaactactaaaacatagctgtcgtattgacgagaaaggt

SEQ ID NO: 124 - DNA, 1346 bp, Escherichia coli
gcttgcgaaaatagtcgtccattattttcgtcagctccggacgttccccgtcatcattgatggcaaaatccagaaaaaaagcatctgcttgcggcgttcggttttgcgccatcaaccggaaggtgagggggcgataaatggcgtatgccggatggctgataacgaatcgggcaaagtcaataaaaagcggcgagtgtgtggaaaacagcgcctgcaaaataatatcagccttttcatcctcccccaaaccttgttggatcatgctcttaatacgagtttcgctcaaattcccggcctcaacaatttgccaggcttgatccagcgaggggtaccgactgacgctctgctttaactcttctgaccaggtttcggatgggctgatgtgcttatcagggccgaaactctcccatgcgctgggcggtaatgttttgcacgcggtgagttttggtatgtggtattgcagctctgttttgtgcagacattccccgccaggaaataccagggtttgttgctcatcattaaaatgggttgccgtgctgagcaccagtgttttgagcggtcgcccttccagcgcggcggcagtagccttatggtgtccgtcgagcagaacgcagagataggaatcagggagataccaggccagagcgcgggcgtccggtttatcgcgataaaacgtcgcacgctcaggattaaaatgtgatggcggctggccgggtagaagaaagcagggcgcggtgtcactgaaagagcaatattcaggatcccagacggcaacggttgccggattactggaactatggtccgttgccgcccaaaagaaatgcccgttgccatccgtcgggtaaagttcacgatcttccagcaaataataaccatcagccatgcatgagaacagcggtgtcagcgcggcaaaagcgtccgttatgccagaccacgggcgattccagttttcgagagcagacaaaaaccgggcggctccctgttcatcctccgcaaaaccgctgtagacaaattccgcacaggtagggcatccagcctcggaccagaaacgtattaacgggacatcctgccagcagagcgaatggataagaccgtgcgagtgcggatcgtaaatcacacattgacgcagaaatcctttcccggacttcaccgaaaaaatgacgcccgcagcagtatttttcagcagacgtacttcaggttttcgaaagggggaaaacatggctactccttagccgaacattcaattaacactatgtagggggctatatgccggatgcggcgtaaacgccttatccggcatggggtttggtacagatttccaggtgtgataagacgcatcaggcgat

SEQ ID NO: 125 - DNA, 128 bp, Escherichia coli
  misc_feature (118)..(118): Unsure
gtgttagattgcctgatgcgctacgcttatcaggcctacgaagatcgtgcaatatattgagttttcgaaattttgtaggctggataaggcgttcacgccgcatccggcatgaacagcngtgcacagaa

SEQ ID NO: 126 - DNA, 452 bp, Escherichia coli
aggcggaattaaccgtcagttgttgagtttttaatttgttctgcgtgttgattatgcgctctggctgaactggcaaagaatgcccatatcaacacaatgctccatggaaaaaagcaaataccgacaatcaatataaatctttctacaaaacgttggttatgggggcgggtgagtactaaataaatgagccagaaatagactatccaggaaatgaccgccgcagctaccagtgacaatgcgccaaaatagaagccgacaagaccgaaccagctaatacacagtggcgctcctgccgtaagggcgatgccagaaatcaaaaatccgttgcagcgttgcataataatattccctgttgttatttcactcagagattattaccttgctgattttaaaaaagatatacaggttgcgttagttcggtgctttttcagaatctgtccattcgtggtcag

SEQ ID NO: 127 - DNA, 82 bp, Escherichia coli
tctgaaaagtaaaaccttctgtacctggctgattcacacctatcatgataaccgtcgttggtttgccgccatagtgagctac

SEQ ID NO: 128 - DNA, 69 bp, Escherichia coli
gtaagtctcttgtgccattccacctcatacaggtttgcctgcaaacagtactgatattgcactgccaga

SEQ ID NO: 129 - DNA, 120 bp, Escherichia coli
tatattgggtcttgtgttgcggtaagaggttacacgccaggacgcaggttaaatgcttacaatattaggggatattgtttgcttttaccggtaaccaaattccccggggctatacaatac

SEQ ID NO: 130 - DNA, 174 bp, Escherichia coli
ttgttcccttttacaaattacaccatcactttgttgtcgcggttttgctaaataattggaacacgtcagacgaataaaatgaaaacagaaattctgctaaacaattcatcttgccaggattttgattaggaaagtgaaaaggaaaggagcaagctaagttgctccctttaatca

SEQ ID NO: 131 - DNA, 82 bp, Escherichia coli
agtgaattaagctgatgtgaggctgatttgcccgatgcgcaagcttatcgggcctacaatttgtaacgattctgtaggtcgg

SEQ ID NO: 132 - DNA, 260 bp, Escherichia coli
actaataaatacacaaattaataactaaccgtacgttagtaaagaacttgccataacctcatgtaaaaccataatccgactaaatgattatggtttttttattcttaaaatttatttatttttctgagagcagcgtcattgctggggttgctaagtttgttattcattttgagaataataatagtgaaagagtgctttcggataaatctcagttcctgttagaatgctatgtacatcgttgtgctttacggactaaaacc

SEQ ID NO: 133 - DNA, 81 bp, Escherichia coli
aatgtgctgagcgttccccttactctcagcccgagcgtgttgatagcagttaagccctcttaattcaggagggcatttgta

SEQ ID NO: 134 - DNA, 288 bp, Escherichia coli
ctctccttgtttttgcatgtatacataacagcacattattggttatgaatctataatttgcgaggctgatttgatctgaatttgctattgagctggaaaataaataaaaaccaggcgctaccagcgttgttcaaggtatagcactgcagcaacaataattgctgctatgaatatataaaatgcagtgataccgagagcttcgctcatatgaggttccgcagatgaataaccagttcagattagaatgctgcgcttaagagcaaaatgataaatctggttgatatttga

SEQ ID NO: 135 - DNA, 2147 bp, Escherichia coli
  misc_feature (1771)..(1771): Unsure
  misc_feature (1817)..(1817): Unsure
  misc_feature (1873)..(1873): Unsure
  misc_feature (1902)..(1902): Unsure
  misc_feature (1914)..(1914): Unsure
  misc_feature (1918)..(1919): Unsure
tcattgcttacacagtaaataaagcaacttacatgccaaaaaatacttaggggtgaattaattacgattgtaatttcagtttgaaaaagtcatatttcggacagtgttaacttttcggtgtgggacgtttgccgggatgataactacacacgggaaaatgctttttactagtcttttcaaggaagaatcaccttatgtctgcatcttcggttaagccgttaaatgttcaattacccgcaataaccctgatcctttttgcgctctgtgttgggatattttgttacctcgcacaatggatgagttacgaagaagtcgatcaatccgcactcatccatctcggcgctaacgttgcttctctcacgttgtcggatgaatcctggcgcttattgagcagtgtttttctgcacagtagtttttcccatttgctgatgaatatgtttgcactcctggcggtggggacagtagcggaacggatactggggaaatggcgactcctgattatctggttattctccggcatctttggtgggctgatcagcgcctgttatgcgttacgcgaaagtgagcagatagtcatcagcgttggggcatccggggcaattatgggaatagcgggcgctgcgatagcaacacagcttgcttcaggtgcgggcacacaccataaaaaccagcggcgagtatttcctctgttgggtatggtggcgctgacactgttgtatggtacccggcaaacaggaatagataacgcttgccacattggcggcctgattgcggggggcgcgttgggttggctgagtgcgcgtttagttgggcaaaatcggctcgttacggaaggcgggattgttgttgcggtcactcttcttctgaccgggactatctggtttgtgcagcagcagattgatgaatcagttttacaggtcaggcaaagcctgcgtgaagcgttttatccgcaggagattgaacaagagcgacgacaaaaaaagcagcagttagtggaggagcgcaacgccctcagggaaacattatccgctccggtaagtcgtgagcaggccagtggtgatttactcgctgagattgccgatatccatgatatggcgatcagtcgggatggtaatacgttgtatgccgcaattgaaaacacgaacagcattgttgttttcgacctcggacaaaagaaaatcctgcatacctttacagcgcccatagcgaaagaaaagtcagtcaaacattgtggtggctgtaaagatcagggcgtcagatcgctggcattaagcctggatgaaaagttgatttatgcgacttcatttgaagcgaatgcgttatcggtcattaacgtggcgacgggggagattattcagtcgattaccaccggcgcacatcctgacagctttatcctctcgcgtgatggcacaaaagcctgggtgatgaatcgcaccagtaatagtgtgtcagcgattgatctggtggcttatcagcatgtggcggatatcccgctggagaaatacgacgggacggggatgagcggtaaaccaggcgcctgggttatggcactttccccggatgaaaaaacattactggttccgggagcaggcagaggtaacatcgtgcggatcaataccatcacgcatcagaaagaagactttcccgcaggtaatgcgcgtggtgtcgtttctgcgatgggattccgaccaaaaaatggtgagattatttttgccgatagccaggggatttcacgtataagagctgaggatcaacaagccagcattatgancgcaatggtgtagcaggagcgtttattccgttgagggtattagccnggacggtcagtatttagcgttggtgtcatatggcctgcaaggttatgtcatcctgntcaatattaatgcagggtagattattggngtttatcctgcnagcnnccccaataatgttcgtttttcagcggatggtagaaagatatttgttatggcgaagaacgggctaatacaattggacagagaaagttcacttgatccgcaggcaattattcgtcatccccaatatggcgatgtggcttgtatccctgaaccgtaagaaaaaagggcatgataatcatgccccacaactcaatgagaaagtatgttttgttcatgccggatacatcaggc

SEQ ID NO: 136 - DNA, 9127 bp, Escherichia coli
tgagattacattgggaagataaaaacagcgcctgcacaaagcgccagaatgcggatgagatacattggtacagagaacacccagaattcgggaagtttgtatttccccattccgaggatcatggctggcattccgtcaataggcatatagccgccattccagccagaaatcaccaccgcaatcgcggcagcggtcgggttaagcccaaggctagtacaggcggcaatggcgatgggggcaaaaatatatactgaccccatattcgaacccgtgaaggtggcgcaggtactggtaagcaaagcaaaggcgacaataaatacaaacggtgagacgccagaaccgagcacacctgcaacggcatcgccaaccatcgccgtaaagccggtgcccgccagtgcatcagctacaccgatcacccccgccatcattaaaatgaccggagcccccatatgatcgcgaacttctttgaagtccagtacatcgatcatcagaacaaacgcacccgcaagacccggaataacgaaggcgatatttcccagaatgttcattagcatcatgccgataacgctgacagcgaatgcggcaatagtgcaatattctttccaggcaggaagggcgttaaacgtttcctcgcgtgccgccagcgcatcctcggaagcatccgcaatgggatgatccggaagaaaacggtaggcaataagactccatgcgaggaaagccgctgacatgatgagattcaccagcgcaaagcgccccatcgaaatctcctgatgaaaccccgcggtttcgagtacggtcgccgtaacgccaaagagaagcgcgagattgataggaagaagcgggtggttggtggcaaatcccaggggcatcattaatttcgatgttggtagctttttactgtacggaatggtggataccagcgacagaattagcacgtaataaccggtcgctccggtgccggcaagactggcacccagcataacaatgactaacaacagcccatagctgcggtaactgcctttattgaccaggcttatcatcgcagatttaacgttgctgataagccgggttttttgtagcgccgccatgaccaccataaaccctgcaatcatcaccacgcttggattgacgaatccggcaaaagcctgttgaacggtcgaaagtcccgatacaaccagcaataaacacgcaagcagtggcggtgcgccaaaaggcattttgtccgacatgatcagcacgatcatcaggaccagtattcctaatgccaggatcatttccattgtcattttttctctccttttaggcttccagcatgtcgcgcggtactttaaagaccgctttgcgtattgaagtagccgtgccaattgcgcacagcgcctggtgaggttcctcaggcataaagacggcgaaatcaccggcgtgtagggtgatggcgacactgttttcaggggatggggcgataaacagatcgggcttacgttcttcatcgttttcgcgagcgatgggccgcgttcccgcattaatgccctcacaaccagtaatcaccacctgtatatcggcccatagatggtgatactccgtatggcggagttcggcgggttgcgtgtctgaagttcccagcgtgcagaaccaccgacatccttcaggttgccagcgaccgtcctctctggtggataacgccgataacgaacactccgggcgcagcagaatatttctcacccaggcaggaagccccgccagcgacaaatggttgagattaccgataatcatgatgcctgccccttaacccactcgggggagatgcgtacgtacttgatggcctgacgccaccaggtgtaagcgatatgtagcgtaccgtccgggctttgtttgatgctggggtaggagaactcacgatttagcttttccagggaattgttggtcatgcagtagccgtcgccttcatcgagattgcgccgccacggccagcttttcccaccatcggcagaaatcgctaccgtcatcggcgcgcgtggggccccccagaaagcggagcgtccgacggctgtcggttctttgcggctgtcgtcgccatcgtcgatttcgtcataaagcgacgcgcgacgttctactgcgcctgccgcactcatcgcgttgtacaccagcgccagttcgccgctggcaagtgtcgttacctgaatagacgaattgttgttgggcaattcggttgcttgcggtactgaccagctctcgccgttgtccgcggaatggctgatatagatgttgtctgcccaacggctgcgaaagagagcaaccaacgtaccgttgtgcagcattgtgatattcatatgaacacagccaagactttgcggcacctcgacatcgcgccaggagtgaccaccgtcagcggaaattttcactgcgctgatatcatcattgccgacccatttttcgccgggttgggtacggcaataaaagacgggcagcagccagttgccgttatcaagcaccgtgattggctgtcgaatgaacgtaccgggtttatcaagcagggtggcaatctcgccccaggtttgtccgaggtcgtctgacttacggtagcggacgatggcggtgtcctgattaccggatatttgtgcggtccataggagccacagcacgttatccggcgcgagaaacagcaccgggttttgctctgaacgcgtgtcatcgtgggaaagtttgaccgcatcgctccactgcattccgccagcgggcaatcgcgatccccagacagaaatatcggcaataccttcctgcgttcccgcaaaccagacgcacattaacgcgccatccggcaaaggcagaatattcgccgcgtggttttgcgggcaggacgagggcagcatggcggtaagcacatgcgaatcgttttcggatggacggatgacgccgtcacgaataagggctacagacatagttagactccatcttaaagttggtaatagatttattaatgcgagtgcgattcatgcgtttcgagcaatgtcgaaacttttttattttttctttcacggataatattgagtgtctcaacacttaatgagaaaaatatcgcgaagtagagatactctttggcaatatgaatgttgagactatcggcaaccagcaatacaccgacaaacaataaaaaggttaacgccagtatttttattgacggcgtggcgttaacgaaatcaccaattgttttcgccgcaaacatcatgacaccgacggcaatcattacggcggcaatcatgataaatatatgctgagaaaggccgacggcggtgatcaccgaatccaggctaaacacgatatcgagcagcattatctgtacaatggcaccgcacaacgacagttgccgcgatccgctgccatgttcgtcttcctgcgcgggcgacagctcttcgcgtatctcctgtatcgctttataaatcaggaacagcccgcccccgagcagaatcaaggtgcggaacgaaatctccagcgtcagcacggtaaaaagcggctgggtaatatgtgaaagccacgcaatggatatcagcaataatatccgcataatcatcgcgcagcttaaacccagtttacgcgccatattttgttgtgataacggaagttttgccaccaccagtgaaagaaaaataatattatccaccccaagaataatttccagaaaggtgagggtaattaaagtgagccagatatctggctgcataaaccacaaaaacatggggtaatcctttattctctttatctaaactttatagcgggctggataatagagttaatttaattaatgttataatgacgaataatttgttgaatctcgctgatctgttcaggcgtgaaattaaccgcgtagcggctatcaccaacatcatgccccataagctgcaacgcttttttcaccgcagccggggagaatgctactttataaagatcggtacgcaggcccgttacactctcctgtgcttcataagacccttcaatatcaccggcatggaagcgagaccagatggcattgatttctcgcggcgcgatgttggcgagcccagagatacaggttgaacatccctcgacaaaccctttatggatcagcgaatccgggccgttgagcacattaaagccgtcaatgtcgcgcaccgcatcgagaaaacccttcaggctttcgtcgcttccggcgctgtctttaatcccaatgatattggggtgcgacgccagagcacgcgcggtttctggctggatcgtattgccagtgcgggccgggatgttatagagaaacatcggaatgctcagtgcgtcggcaattgcgctgtaatgcgcaatcaactcttcctgtttcagcggtacgaagtaaggggcaatgaccgacacggcatctacgccaagtttttcaatctgctgacccagacgaatcgtttcgcgcgtagagatctcgccaatgtgtgccacgaccggcgcacgaccagccacttcatccacgcaggtttgcgtaacgctgagcttctcctgttcattcaacacaaaaaactcgccgttggtgccgccgcaaaaaatcgcgttacccgcttccagttgacgattcacctgcacttttaacgccgggatattcagactgccggtcgcggtaaacggggtgacaatggcggttaatacaccttcaatggttttcggcatgatttactccttaaatggatgttgcggaaacagtgtttggtaaatggcctgtacgtcctgtagatcaatttggcacggcacattgttcataaggcgcttcacgttcagtgccgcctcgctcagagaggcaatatcctctggcggtacgccgagagccgcgagattgttgggtagcttgagttgattgactaatgcctgtaaccaggtcaccagggcatgagatttttcttccgcgctcagggcggtttccgcatcgggaatgcaatcccagacccgggcaaatttctcgaccgcccaggggcgaacaaacgccatgcacggcgccagcaagatggcattcgcgacgccatgcggcagatgatatttgccacctaacgggtaggagagcgcatgaacgagatgcgtgcccgcatgggttatcgctacgccgccatagtaagacgcccacagcatttccagttttgcgcgcagatcctgaggatcgttcacggcgggttgaatgtgccggaaaagtttacttaacccagtcagcgccgcgttatcgctgaccggatttgccacggtcgcggtaaaacactccagtaagtggcaaagagcatcaatgcccgtggacgccgcaatatgcgcgggcatgctggtggtcagttccgggaaaagcgccacatagtctggtaacagcacctgggaaataatacccaccttcgtgctttgctcagggattgccagaatcgcattcggcgtggcttctgagccggttccggcggttgtaggaatcaaccatgattgcacccgctgagtcggtttttcacccgcaagcagcgcatccagccccggtgattgtggatggcaaagcaccgatagcagcttcgccacatccaacacgctgccaccgccgatcccgaccaccacatcaaaagaggcatcgccaggggcatccattagctggcgcacatcatgatgcgtgggctctgcgggcacattatcgataacgttaacctgcgggcagtgcttttccagtaaggcgcgaatctgctgcacaccgtcgagctgcgcaatattacggtcagtgaccagcagcatttttctgatgtcgggtaagagcgacgtcagggaagggatagcgcctgcgccgctcagtatcgtgctattgataattaccacaaataacctctcttctgttgattgaattcaatcattcaaaatgccgtagcctacgtaatatggtctaattttataatttattcgagtgattaataacttgagcttgctcacatttaatcaattgtgattgaatataatcattgttatcataaaacaacctggagtgatgatggaaaagggaatcactaagccgagcattctcgtcgttgccgatgatttcacgggagccaacgacgcgggggtaagcctggcgcaggtggggcatacagttgatgtggcctttgaaatgcattatcgcggtgatgccagcgtatgggtgattaacagcgacagtcgggcgatggatcctaagctggcggcgatgaaaataacctcgctgatgagtcatctccctctggcgaataatccgccgctcgtgattaaaaagatagattccacgctgcgaggcaatatcggcgcagaaattgaagccctgatgaaggcatgcggtataacgggcgcagtggttgcccccgcatttcctcaggcgggaaggaccacagtggccggtgagtgttgggtaaacggtgtgcggataacggaaaccgagtttgccagcgatccgaaaaccccggtattgagcgcccgaattgcggacatcatccggttgcagacggccattccatgccagcccgttacggtttctcagctcagccatttgtcttatgagcaaccgtggattagcgtgatagatgcgcagacggacagcgacctggatcgcatcgctgccgctgtgatgcaggctaaacaaccgctgctgctggtcggctccgctggtatttgtgatgccgttgcccggctgctccgcgattatgccgccacccaccgtgctggccattattggttcaatgagcgaaatcgctcaacggcagatcgccacacttcattcacacccatgtatcacacagatatacgtcgatgttgaacacattctggcaggcaatgccagtgactatgacgcgcgtattgtgcaggccttgcagaaaggcgaccactgcattgtccacacctgtaacgattctgtagcaaggcatcagatcgacaccctttgccagcgttggcagatgagtcgcgctgcacttggggaaaaaatttgtcggtttcttggcgaacttacccggcaagttctgcttcgcacaatgcccgatgcgctttatctctctggtggtgatgtcgcaatggcaacagccagtgcgttaggcgcgaccggatttcgtattacggggaaggtggcgcaatgcgttccatacggtcactttctgggcggtgtctggtcccgttcggtgatgacgaaagccggtgggtttggcgatgagaccacgttgcatcaggttctgaattttatcgaggagaagtgtagtgaataatattattgcggtaacgatgggtgacccggcgggtattggcccggagatcattattaaatccctgagcgaagccgggcttgctggtgccccggtggtggtggtgggctgtgtgcgcacgctgcgacgtattatggcgatgaatatcacgccgcaggcagagttacgcgtcattcaaaaggtgtgcgacgcccattttgctcccggcgtgattaacgtgatggatgagccgctggctaaccccgatgcgctgcacccggagtggacaggctgcggcaggcgatttaccgtatcgctgtatcaaacgtgcaacggctctggccttatcaggcgaggtgaaagccatagccactgcgccgctgaataaagaagcgctgcatcttggcgggcataactatccggggcatacggaattgctggcccatcttaccggcagcaaagagtacgcgatggtgctctataccgataagctcaaggttatccatatttcgactcacatctcactgcgtaaattcctggataccttgaatggtgaaagggtcaaaacggttattcgtgttgcgaaccacttcctgaaacgtgttggtattgaacgtccgcgtattgccgtggcgggtgtaaatccacatgcaggggaacatggtttattcggcactgaggaaatcgagattatcgcgcctgcgattgaagcaatgcaggccgaagatattgatgttactggcccgtgcccgccagataccgtgtttatgcaatgccatgaagggctattcgatatggtagtggctatgtaccacgatcaggggcatatccctttaaaactgcttggattttatgatggggtgaatatcaccgccgggttgccatttattcgcacttctgccgaccacggcaccgcgtttgatattgcctggacaggaaaagccaagtctgagagcatggcagtttccatccagttagcaatgcagatttcgcgagaataaaatgaagggatataaccggttagagcagatcatggattacctgaaaagccataatctggtcaccgttgatgagctggtggcggtaaccaatgcgtcgccggctacgattcgtcgagacctgataaaactcgatgagcagggtgttatcagccgtacacatggcggtgtgaccctcaaccggtttattcctacccaaccgactacccatgagaaaatgcagcgcagcctggcggaaaaacatgccatcgccagcgcagcggcgtcaatggtcaaagcgggggattccgtcgtccttgatgccggtacgacaatgattgaacttgcgcggcagattacacatttaccgcttcgcgtgatcaccagcgacctgcatatcgcgctttttttggctgaattcaagcaaattgaagtgacgattatcggcggacgtatcgacgactccagccagtcctgcattggcgaacatggtcgtaaattgctgcaaaatacctggccggacgtggcatttttaagctgtaacagctgggatcttgaaaagggtattacagcacccacggaagagaaagccgcactaaaacgcgatcttatcgcgcatgcttcgcgcaaaattctcctggctgacagctcaaaatacggttcatggtcgctgtttaatatcgcgcatcttaatgaactgacagagattattacggatagtcagcttgatgggcagacgcgtagaacgcttgcgtccttgtcgacgcgtttaatcatagccgactaatctatgactctgcggccagctcatccggcaatttaataaatgcgtcaggctggcgacgtttggccttacgtttccagcgcgaggatctgctggcagtagcgcagaaaacgccccaatatcttacgcaaaaccattttttcgct

SEQ ID NO: 137 - DNA, 727 bp, Escherichia coli
cgcgctctgcggcgtttttttgtgcacagaaaacccccagctaggctgggggttccggaaagctttcagctttgagccagttattaaaaccccttttgatttgttaaaacaccttgcggtctggcaactgcaagtgtcaaacaagaaatcaaaagggggtcccaatggggaacgaaaagagcttagcgcacacccgatggaactgtaaatatcacatagtatttgcgccaaaataccgaagacaggtgttctacagagagaagcgtagagcaataggctgtattttgagaaagctgtgtgagtggaaaagtgtacggattctggaagctgaatgctgtgcagatcatatccatatgcttgtggagatcccgcccaaaatgagcgtatcaggctttatgggatatctgaaagggaaaagcagtctgatgccttacgagcagtttggtgatttgaaattcaaatacaggaacagggagttctggtgcagagggtattacgtcgatacggtgggtaagaacacggcgaagatacaggattacataaagcaccagcttgaagaggataaaatgggagagcagttatcgattccctatccgggcagcccgtttacgggccgtaagtaacgaagttggatgcaaatgtcagatcgtgtgcgcctgttagggcgcggctggtaagagagccttataggcgcatttgaaaaacctccggctatgccggaggatat

SEQ ID NO: 138 - DNA, 58 bp, Escherichia coli
gctatactcgtcatacttcaagttgcatgtgctgcgactcgaattatttagagtttga

SEQ ID NO: 139 - DNA, 272 bp, Escherichia coli
aagaaatgcagaaaccgtaggcctgataagacgcacaagcgtcgcatcaggcaaccagtgccggatgcggcgtgaacgccttatccggcctacaaaagaaatgcagaaaccgtaggcctgataagacgcgcaagcgtcgcatcaggcaaccagtgccggatgcggcgtgaacgccttatccggcctacaaaagaaatgcagaaaccgtaggcctgataagacgcgcaagcgtcgcatcaggcaaacagcgccggatgcggcgtgaatgcctt

SEQ ID NO: 140 - DNA, 2204 bp, Escherichia coli
attcgggcactaatctgaaaagtttgcccactgcttttctcccatcttctgcgcaataatgcccggcaaaatatcccctctccgttctgtaaaagcatttatacaagaagaaaattgttctgccggttgctctggccctgatgggtgtaaattcggacgtttatgcggccgatgtaaatatcgatattttaagtgcgacagtgaaagataaacgcattgagggagtatcggtgacgctgcaacgcaatggcgcacaatctgtttctggaaccacaaatgcatcgggcagcgttaatctgggttctacatttgctgatgatcaagatgctttattgatcgtcaaaaaagagggctattctaatctggtggtcaaatgttcgtgtgctggcatgacttatgcgattagtccggcaatgactagtctggatggcatgcgtgtagttttgagctggggcgaaaagccttttgatcttgattcacatttgatcttctctggcggacatatctattttgatagtaaagaggggactgatgctaatctggatgttgatgatacggatagctatggaccagaaactgtcactatcagcaaaaagcattttggcgaaagttacatctatgccgtgcaggactatagcaataaagggttgcccaacagtaattatctctctgccagtaaggcaaaagtgtttgtttatgtagggagctccctggtgcgtagttatagtgtccctgctggaaaacgagggaacatctggaccgtgtttaaactcaatccaaacggcgagtttgaagatatcaactctgttaccagcgccaattttaacgacaccacattagacgtcagggatttagccactgtgataatgcctgcgacggactcttcagctccggcttcgcctgcgatgcaaaacagtggagatactcaactggcaagaaaatataatcgcgaaggtgaagctgtttataaaaccggtcaacttgagcaagccattcaactcttccaacaggcaacagaattagacggcaattacggacaggcatttagtaacctggggctggcgtatcagaaaaatggcaacatagcggaagcaatttaggcaaatcgtaaagcgatctcgttagcctgtggagcaaatgcggcgacaacgcgcgctaactcctattataacattgccaaaatttatggaactgctggacaggacgctgatgcattgcagcattatcaactcgctcttcacgatgccattttataataatgaaagtggaatcatatttttaaattttatattcttgcttgtttttctggtgaagttatccatcattcactgttctattatcttaaggatgatggaaatagaaggttttttaatgataataaaacatattcttatgttatttaatcacgaattttttaatatgattatgtatcaatacattatattacccgatgtgttactgaattatcgactattactttaatatttagtgatcgtaaacatggttctccagattactcaaatttctggcatcttacaatatcatcatcttcaaatagttaaattaagattattgcactgccaaaacagataaattgaagcagctggtagatattgcagaacaaccttgattccaacggcgaaatcgtatttatcctccaggttgccgtccatatggagttgaatatcattcagtccacgcttgatgagtcgatatcgctatatccatagacagggtagctttttacacgagagtgtccggtgttttctaacgggctggcaatcattccgttttgttgtttcgtatcactgctataacaatttctcttgattttcaatctttgagctaatcattgaatacagatcgggaaatattaataccatatatgttttattttgaaaatccttgttccatctgactatacctaaggtatctatttcttcttgtgattattaccaatgaaacaataagtgacggatttacagtacgttgctcataaagacaacaatcaattaacgttgataaaaatatgttatgtaaaatggcaataaagtagctactctaactaattagtattataaaaagtcgataaagcggctctgttaaataaaatactggttttttatctatatatttccatgtgggtaattttactgtgctattttgttacaataaattaacaataaagttaccagtggctcatg

SEQ ID NO: 141 - DNA, 1291 bp, Escherichia coli
tagaatgcctccgggaaacctcggccttcagaccggggaggaaaggaggcggttttccgactaactgtactttgcataatcacattttcctctttagtatgtgaacacatgaaacgcgcatataaataccggttttacccgacaactgagcaggctgagcttttagctcagacgtttggctgtgtgcgcttcgtctacaattccatccttcgttggcgtaccgatgcgtactacgagcgaaaagaaaagatcggttatctacaggccaacgctcgccttacggcgctcaaaaaagagcctgaatacatatggctgaatgatgtttcctgcgttcccctccagcagtcgttgcgccaccaacaagccgcctttgctaacttctttgccggacgagctgcatatccggctttcaaaagcaaacggcacaaacaggtggctgagttcactgccagcgcgtttaaacaccgtgacggcgagttgtatatagcaaagagcaagtcgccgctggatgttcgctggagtcgagaattaccatctgcgccgtcaaccgttaccatttccagagatagcgctggcaggtactttgtttcctgcctgtgtgagtttgaacctgtatcaatgcctgttaccgctaaaacggtcggcattgatgtgggcttaaaagatttattcgtcaccgataccggattcaaaaccgacaatccccgccacaccgctaaatatgcgaagcgattaacgctgctacagcgacgtttaagcaggaagcaaaaaggctcaagaaaccgtattaaagcccgcttaaaggtcgcccgactccacgcgaaaatcgccgattgccggatggacaatctgcacaagttgtcccgcaaactgattaacgaaaaccaagttgtttgcgtcgaatccctcaaggtgaaaaacatgatccgcaacccgaagctgtctaaagcaatagctgacgcaggctggagcgaacttgttcgccagctccagtacaaaggcaaatgggccgggcggtcagtggtcgccattgaccagtatttaccgtcctcaaaatgctgtagttgctgcggtttcaccatgcaaaaaatgcctcttaatgttcgtaaatggcactgccctgaatgcggcgcagaccatgatcgcgacattaacgcggcacgtaatattaaagctgccgggctggcagtgttagcccacggagagcctgtaaaccctgaatcgcagcacgcggcttaggttcggctcgttgaagtgggaatccccgtcattcagggcggggagccgtcaa

SEQ ID NO: 142 - DNA, 174 bp, Escherichia coli
ccgatttttaacagcaggcaatggtgctcaggtgccggatgcggcgtgaacgccttatccggcctaccaaatgatgtgaattcagtgtattgcacaaccttgtaggcctgataagcgcagcgcatcaggcagtcctgctctcgccatcaacattagtgagccttgcgccccaca

SEQ ID NO: 143 - DNA, 33486 bp, Escherichia coli
  misc_feature (17856)..(17856): Unsure
gcaacaaaaaacccatttatgtaaacgggttaatgaaaacaataagttagagtaaaaacaataagttgggttggtggtcagtggtggttattacggggtaatgccaaccgctgccgccactttgtcgccacttgttttaccttagacgccaagggcctctatcttcaatctgttcgactaacccctcctcttctagttcacgcaatagtgcaacaacccaatattgttggttcgaacttgttgctttccgtttttctccccaatcgaggccgcttagacgaaatacctcagcttgcttaacgccgttgccgtttttttgggcatcagggtgagttttaagtacagataaagccaattctttggctctgttgcgcaattccgctccctgatgctgaaacttattcattgatagtgctccatgtgaaaaaaaagaatattagctcaacagggcaaaatacgcattttcaaaaaattcctattgatgttggtagtgttgccagcggattaaaccgtaatgcagtttccaggtgatccggtgccagatgtgcgtaacgcatagtcatttttatgtcgtgatgtccgaggattttttgcaaagcaaggatatttccacccgacatcatgaaatgcgctgcaaacgtatggcgcagaacgtgtgtcagttgaccgcgagggagcacgatagacgttttttccatcacggataaaaattgaaaatagcagtctgtaaagaaattgaacccatcaagcgccatgatctcttcgtaaagctctttactgatagggatgcttctgtttttcttccccttcgttcttacaaaggtaattcggtatttggtcacttgcgagcgggtaagatttattgcttctcgccagcgtgcgcctgtgcttaggcatatcttgactaccagtgccagaattgggtcctgacgtttgcaatcagccagcagttcaacaatctgctcatgggtaagccatgccatctctttttctgcgatggtgaattttcgcatgttctccagtgggttcggatacgaccattcgcccaggcgggatagttcgctaaaaacactacttagatagctttgctccaggttaatggtgaccgggcttgctcctttcttccatttctcgctgaagtagatctcacctgtcaggcgtttatctcgatagtgggcaaacattttagaggttagatcagttgcaaggggattgcccagagcgtcaaccatcagcagcaatttgtcatagacatgctgcccagcagtcagtgatttaccatgtagtttgaaccatagctcaaccacgtctttcagtgttcgacgatccactgattcacccagccagggctttgcttcggtttcttccatcgtgtgacgctcaaaagccagtgcttcgcctttggtggcgaattgtttacgcacacgacgcccactacgtccggcggggtaacattcgcaaagccattttcctgtggtgagttttcgtacagccataaaaaatgccctccaatagagagcatttttactgtatgcataaccagtgtcaatgtatgtttatgtattttacatacatcacttatttaatcggaggatttttctgaatgagaaggtttgattttttctttcgcggtagaccatagcgtttggaaacttggcggataatccatttgatcagaaaaagcagaatctccagacatgttccagtccttaaatacctgaatagcatcttctttggtcgcagtcgaaccgtaaatttgtaggaagacttgaccaaacattaaggcatgccttctgtcttttctgcgaatggactcatgagtatactttttggagatactcagacagatataagaaagccatgataaaatggaaattccaatcaggcctctggtgaatagataaaatagttcaaatcctttagcatttatgaaatcagtaacaaaatataatgatatgaacgaaaaaatgacagcggaaagaccggctattgcaccagcaatagcccatgttttggcgagtgaaataaagtgatcatcatcatcacctaaatcatcttttacactattgacatattcgggaattttttgatcaattctctcttgatgtgctcgactggttaattcgttatttgaagcctctaactcttttatcctagaaaaagtttgctcaagtaaagattctttttctatgtttaaattttctaactctttgttttttaatgataatgaggtgttgctttcttgcaaatcagataagcgagctgtataaaaacgtaataagtttctgaattcattattatctttttttaacacgttaagttgtaattcaatatcttcgtcgctaaagccgactctatctaagttttggagatggcgtctatattgatccttgaattcttcaatttcaccatttttcaacaagttctttagatatgtgcgttcatgttcaggaagtggaatagaatcatcatgtataaaatcaacgtattttttaaactctgatttggtgatgctgttttgtattgtttcttttttgtgttctttagagtccatgataagtccaaattaaatgtttttaatgaaagcacagtggcattttgctaaaagttttatattctcaatgtcacatatgaaatcagcatgagtagatattactttaacttttcctacgggtatgcggaccaatgttctaatgtttattttgccttcaatttctactaaccattcaccatcagatatttctttatatccatagtctactacgaaaacattttcgctatcgatcacaacctgcggatttataaggttgtgtggtattaaagatttatcaaagtggatatagtccgcatctattaacttaccatttattagcttatatgctaataactttgctacatcagtatttacatcgttcgattttgagccttttccagtaacgagccaatctagtgatataccagtttcaagtgcgcattggataatccaatcggctggaaatgtatccctcatataacgattagctagtgtgctttttgaaatacccaaatgatcagctaaagcttgtcttgtcttaaatccataggctgcaacgattcgctctattgctgcttttccgttttgatttatagtaacagtgttctcatttgggtttttaggttctctgttgaggtgccgagattcactgttacaattgtcgtgacttttatctgcaaagctttccatttcggtatcagtaccaaatgctaaccactcaatcgatacaccagtttccatactacagataacaacccagtcagctgggaaagtgtcacgcgcatacctgttcgccattgtgctctgtgatatccccagatgattgcagaatgcttggcgtgaagaaaaaccatacgcttctaatatccgctcgatgactgcttgccctccgcgattctgcatgattaaggatttctttttttcgtccacatggcgaaatgtgatttcgtgtgttgacataaccgaattgcgatcctattctccgaaatgtgaagtttaagtcacgattaaaactgactcaccacaagccaataggagatgttgcatcatgacccctaacatttcaataactctgaatacgccacatgtcacaatcgagcgttatagcgaacttactggtctttcaatcgacacaatcaacgatatgctggcagatggtcgcatccctcggcatcgtcttcgtaaagacaaaaaaagagaaaaggtaatgatcaaccttgctgctcttaccgttgatgcacttactgattgcaatgttgtgttcaactagttccattttgggatacatcaggggtgtcgactatgtttgattaccaagtttccaaacatccacattttgatgaagcctgtcgtgcattcgcactgcgccacaacctggtgcaactggcagaacgtgcaggcatgaatgtgcagattctgcggaacaagctgaacccagctcaacctcatttattaaccgcaccagaaatctggttgcttaccgatctgactgaagattcaacgctagtagatggttttctggctcagattcactgcctgccatgcgtaccgattaatgaggtggcaaaagagaaactgccacattacgtcatgagtgcaaccgcagagatcgggcgtgttgcagcaggtgcggtatctggcgatgtaaaaaccagtgcaggtcgtcgtgatgctatcagcagcattaactctgtaacacgactgatggcgctggccgctgtttcattgcaggctcgtttacaggctaatcctgcgatggcgagtgcagttgataccgtgactggcctcggtgcttcattcggtttgctgtgaggtgcttatgctgacgaaagaaccatcatttgcatcgctgctggtaaaacaaagtccggcaatgcactacggtcacggctggatcatgggtgaggatggtaaacgctggcatccgtgccgttcacaagatgaattgctggcagaactatctacgaaaaaacaggggaacaaatggctattgaaggcgctgcggcgactgttccattaagccccggtgaacgcctgaacggacttaatcacattgcggaattaagggcgaaagtatttggcctgaatattgagtcagagcttgagcggtttattaaagatatgcgtgatccacgggatatcaataatgaacaaaataaacgggcactggctgccatattctttatggcaaaaatcccagctgaacgtcatagcatcagcattaatgagctgaccactgacgaaaagcgggagctgattaaagcaatgaatcattttcgtgcagtggtgagcttatttcccagacggctaaccatgccgaattaaccaactaatgaaattcatggcgtaaacccgccgggcatccctttatctaaattcaggagaattgattatgcgtaatattgaaaccctcacgactaaaaccggaccggatgatgcagggcttaatattttactgacagaggctcgtctggaagaacgccgggcaagggctgaagcaatggcagctcgccttgatagcctggcgtgtcatatcacatcccgccagctaaaccacgtcgaagcagcagaactgctgcgtgtgactgctgaagcaatccagaacgaagcgcaggagatccactgatggctgatgcaatggatctcgtacagcagcgcgttgaagaagaacgccagcgtcatatccgtactgcccgcgccaaaacgccgggcgtgtcccgcgtgctttgcattgagtgtgaagcaccaattccgccagcacgacgtcgcgccattccgggtgtgcagctttgcattacctgtcaggaaatcgcagagctgaaaggcaaacattacaacggaggtgctgtatgagcaccatcctgaaatgggcgggtaataaaaccgccattatgccagaactgaaaaaataccttcctgctggcccgcgactggttgaacctttcgcgggttcttgtgctgtgatgatagagacggattaccccagctatcttgttgcggatatcaatcctgatttaatcaacctctataaaaaggttgctgctgattgcgaggcgtttatatctcgtgccagagctttatttgaggaagcaaacagggaggtggcttattacaacataaggcaggagtttaattactccactgaaattactgatttcatgaaagcggtatatttcctgtatctcaatcgtcatggttaccgtgggttatgtcgctataacaagagcgggcatttcaacattccctatgggaattataaaaatccgtatttccctgaaaaagaaattcgcaaatttgcagaaaaagcccagcgagcaacgtttatctgcgccagctttgatgaaacgctggcgatgttgaaggcgggggatgtggtgtattgcgatccgccttattacggtacgttttccggctatcacactgatggcttcactgaggatgaccagtatcacctggcatccgttcttgaacatcgatcatctgaaggtcatccggtcattgtttctaacagtgacacatccctgattcgttcgctgtatcgcaatttcactcaccactacatcaaggcaaaacgcagcatcggcgtgtcggctggcgagagtaaatctgcaacagaaatcattgctgtttccggggcgcgctgctgggtgggatttgatccttcgcgtggcgtagatagttctgctgtgtacgaggtgcgtgtatgagtcatgacgatatgagcaactctagcggctttaacgaggccgccgcatcattttcatggaacggcccgaaaaaggccattaacccttatctggacccggcggaagttgcgccggagtctgcactttcaaacctgatcactctgtatgctgccgataacgagcaggaacaactgcgccgcgaggcactgagtgagcaggtctgggagcgttatttctttaatgaatcccgtgatcctgtccagcgcgaaatggagcaggataagctcattagccgggcaaagctggcgcatgagcagcagcgttttaatccagacatggtcattctggctgacgtcaacgcccagccttcccatatcagcaagccgctgatgcaacgtattgaatacttcagcagcctgggcaggccaaaggcttattcccgctatttgcgtgagacgattaagccatgtctggaacggctggagcatatacgcgacagtcagctatccacttcttttcgctttatggcgagccatgaagggctggacggcctgctgatcctgcctgaaatgagtcaggagcaggtgaaacgcctgtccaccctggtagctgcgcatatgagcatgtgccttgatgcagcttgtggcgatttgtatgccaccgatgacgttaagccagaagaaatccgcaagacatgggaaagggtggcagcagaaaccctgcgactggatgtcatcccacctgcgtttgagcaactccgccggaaaagaaaccgccgtaaacccgtgccctatgaactcattccgggttcgctggcgcgtatgttgtgtgccgactggtggtaccggaaattatggaagatgcgttgcgaatggcgggaagagcagttgcgcgctgtctgcctggtcagcaaaaaagcatctccctatgtcagctatgaagccgtgatgcataaacgtgagcagcgccgtaagtcgctggagttttttcgttctcatgaactggtgaacgaagacggcgacacgctggatatggaagacgtggtaaacgccagcagcagcaaccctgcacatcgccgcaatgagatgatggcctgtgttaaaggtctggagcttatcgcggaaatgcgcggtgactgcgccgttttctacaccatcacctgtccgtcacgtttccattccacgctcaataacggcagaccaaacccaacctggacaaatgcgacggtaagacaaagcagcgattatctggtcggcatgtttgctgcatttcgtaaggcgatgcacaaagccgggttgcgctggtatggcgtgcgggtggctgagccgcatcatgacggtacggttcactggcacctgttgtgtttcatgcgcaaaaaagaccgccgtgccattactgcattgttgtgtaagtttgccatccgtgaagaccgcgaggaactgggtaataacactggtccacgctttaaatctgagctgataaacccgcgcaaaggaacaccgacaagctacatcgcgaaatacattagtaagaacattgacgggcgtggtctggctggcgagatcagcaaggaaacgggtaaatccctgcgtgataacgctgaatacgttaatgcctgggcgtctctgcatcgtgttcagcaattccgcttctttggtattccggggcgtcaggcttaccgtgaactgcgattgctggctggtcaggcggcaaggcaacagggcgacaaaaaagcaggtgcgccggtactggataacccgcgccttgatgccatcctggctgctgctgatgctggttgttttgccacttacatcatgaagcagggtggcgtactggttccccgcaaatatcacctcatcagaactgcttatgaaattaacgaagagccgaccgcctatggcgatcacggcattcgtatttatggcatctggtcacccattgcagagggcaagatctgcactcatgcagtgaagtggaaaatggttcgtaaagccgttgacgttcaggaggcggtagccgaccagggcgcttgcgccccttggactcgtggcaataactgtccccttgctgaaaatttgaaccaacaagcgaaagacaaatcagctgatggggataccagaacggacatcacccgcatggatgacaaggagttgcacgattacctgcacagcatgagcaagaaagagcgccgggaactagcagcaaggttacgcctggtgaaaccgaaacggcgtaaagactacaaacagcgaattacagaccatcagcgacagcagctcgtctatgaactgaagtccagaggatttgatggcagcgagaaagaggtcgatttactccttcgcggcggcagtattccgtcaggagcaggcctgcgtatcttctatcggaaccagcgtctgcaggaggatgataaatggcggaacctgtattaattacgcgggttaacaattcgtgctcttaataataactggcatatcaggctgatgaacgtaaaaaaacgttttacatcagtaagattattatatactgtaaatataaacagtggttataaacacagtattccgagtggtgttataggaggaaagatgcaggactattttttggagtctttgaagctccagcgcattgatttttttcttaagcttgtagcggctagtgagtgtagtgatgaagagaaggggctggctttgcagtgggtatctgaactgactgatgaactcatggcaaaaatcagaacccacgaatacaaccgctcaatggatgtcatcagttgaggtgacttttatgcgcattgaaataatgatcgataaagagcagaagattagtcagtctaccctggacgcccttgaaaacgagctttaccgcaatctgcgccccctgtatcccaaaacggtaattcgtatccgcaaaggtagctctaacggtgtggaactgaccgggctgcaactggacgaagaaagaaaacaagtgatgaaaattatgcagaaggtgtgggaagacgacagctggttacattagggaacgttgcggacgataaaactggtttttaccgttcgcaaggttgagcaacgagccgtgcgaggcgttagttatggataaattggttgcagggtgatatgtaaataggttaatacgtagcactcttcgaatagtttcgtatttttgttgtcctataatcataagatgacagcctccatgcaccacaatccgtggcgtttgaggcataaaggaggaaaatatgtctgaacttctgcgcaaagttctctctgcaccaggtaagattatgcaggatgtcatccgtcaggatgtgcaacagtctgataatagtaaaattatcacagatgctaatggtgcggcgaccttaaacatgaacaataagcaggtacgtgaatcaatgcgtgccagaatggaagaattggctgcaaaacgacaaggatgaggaatgggacccttagttatcatggtcgtcctggtttgcgggttctggtacaccgaaaatcattaccagtcccgcatcaggcaagcaagaagtaatggttggaattcctatttttatgtagctatgcatggttgtaagtttgctattcaggggtttactctgatggctgttacattcgttatcttgctagttataagctcagttatcaatgtttttggttatttttggcctaagttacatgtggacttttattcatggctcacagacgtaaagataatgtcttacccattgttctttgtgttgtctatgctgcttgcggtgtttattgcttatgaccaaggtaacaatgcgcgaagagcaatagaaaacgaagagattcgtcaatctgcatatcgcgagatggcagctcaagatggaattgagtcactgttagttcaggctatagatgaaggtaagctcatctttgttacgctaaaatccagaaaagtttacattggttacgtagctgctcctcggatggagcatcaggaaactcagcatctggctctcataccatacatcagtggttatcgtgataaagatacgctcagataccatgagcagcatcgttactatgaactttaccttagtaaaaatattacagcagactcaactccactgaacttaaatcattttaggcatgtaatcccaatggatcaggttgagagtatttcaatatttgatactgaaacttataaatctttcgaagatttttctacgcctgaccagaccaaagtcactgcatgactatgccgcatgaatatgcatgatcgtttgaggatcgtttttgctgaggcccgccagttctggtgggcttttgcttatgtcatgcacctgcatgaaaatcgctacaaaaagcgggcaggcgtggcggggatacgagcgcgcgcaactcgagatagtgtgatacttatctgagaaatcttaacaaggttcaatacaataccctttcaaaaaaaggggagtgtgatgtttgtaaaaaataactttaatacaaataatttcgatgcggaattagttgaagcgattggtaataggctggaaaacaaccaattttcggatgcaatacttgcaggaaccaaatatctaacaactttgctgcgtgaaaaagggcaatgtgaaggggatggggctcagcttgttggtactgttttgggtggacaatcacctagaatccaaattaatagtcttcaatctgtatcagagcaggacgaacagcgcggatttgaagcactattaagaggctactatcagtgtataagaaatccaaggacacatgacaatttccctgatacagaagattcctgcatgagaatattgatcatgttggatacttttattaagtatttaaaaagagatgttgctgagttcgattacacagcaattcttgaaagaatttatgaggttcactttgtaaataattctgattatgcagaagctttaatatcacaaattccagaaaaaaaactactggattttttccaaagtttaatttctcgctttaatgaaaggccaaccaaggaaattgattctatattcaaagcaataaaccaacgcttttcaggagaggaagaaaaagccgcaatgcggttgctaggtgatgagttacgcaaggctagcaataatgttgagtttgctaatgtatttagaataattaagccgagcgcatggagaaatcttcctgatgatgttttaattagaatggaaaatataatcatcgaagagtgcaaaaaaggatatttggatttctattctgatgcgaccaaaggagctataggaacatggggtaatacatttggtagcaaatttaaaagaagaggtgatcttggtgatgctttaattggattgttatatgatagttggtatacgcaaaattatgttgcgaaatattacgttttttcaatcccttctatcattactgatgatgtgaaagttaaggagttagctgatgctttagcttatgccaccattgtaaatggtgctaagcttttacgaacaaaattgattgatgcatgtaaaaattatcctgataagttgaaagagcatcttagggatgctgttcagcaacggatggatagtgataaaaaatatgcggaagaattattaggtcaaataagctgattattatttgcacctaatctcactttcgatgttaggtgcatttctatatgcctaatctaattcatatgaggtaaatttaaccagttcttcattaagtccaatccatgagttaatttcagatattctgtgttgtagcggaattaactcattcctgacaaaaaccttactagccttttcaacatccccaaacccgccaacattactaggcataatccccatcatctgcggcggtacacggtgcgctgccatcatgtcatcccggctcacgttcttgatgttcagaaactcatcttttgccgccacctctgacagcgggatgatctgaatcccgtctttctttccgttgggtgagtacataaacaagttgcggaagttgcccggccctttggcgcttttcatcgcattgcggaggttgttcacatcctcctggttctgcgcggcatcggtcatgtacatgatgaagcctgcatgactaccgttaatgtaatatttgcggcggaacagcgtggcggactcgttgagcaaagcggatgggatggcagaaagatagccgggcaggccgtagatctcctgattaatatctggttccatcagatgaaaaatgctgcctttcgtgaactgatacggctgggttgtcataccgtattgcacaaaccagtaggtatccaggtctaacccgcgtcgggtatattttgccagggcaggctcaagggcgataacttcaccgaagcggttcgtgcgtttctccaggtaggcgttaccaaataccaggtagtcctgcacaaaacgtgaaaaagcctgctggctgagcagcgggtgagggatataggtactggtcagaatgttgcactttactgcaatcggggaactgtgatgcacggcagcgcggaaggtgcgcgccagtccgtcaaagctgacgggcggctcataccaacggtccatctgtacgcattccacatagtccagtaattctcggcggtccagaacaggaacgggatcgccgaagctgaatgcttcggctgtagtttgacttttaagctggatctgattcgtcgccgcagcgcggttcttcttactctttcccatcaaaaaatctccacaatattgctggtattggcggattcaccctgcagcggttcgttaaacagtgcgtgcatcgttgcccaggccagatcggcgtggctggcttcttcgctgcggctggcttcataggtcgggcggttgccactggcggtggtggcgcgacggattgccatgaatgactgcgcaatgtcggtgtgcccggcgtcaaactccagacggcggtggctgataatgtcgtaggccttgagtaccagggcgtttttaacgttggggttgtagacaaactcccggacggcaggaaagaacgctttcacgttctcataaaccccgtgaccaacgccggttgagtcgatgccgatataggtcacgttgtactgttcggtcagttttttgatggcgtcagcctgggcgcgaaagtccatcccgcgccactggtgacgctcaagaatgcggaacttgccgcccggcacggctggcggtgccaccaccacgcatccggcactgtcgccgttctgcgtacctttcgccgggtcataaccgatccacacttcgcgccagccaaatgggcgcagtgccagtgcatgaaagtcggtccagacttcccagctgtccaccatgcacgcctgcagctcgctgagtgggaacacggacgcgagatcgtccacaaactcgcacatcagcaggttctggtattcgtccgggctgtactccatgcgcaactggtcaaggtcgaacaggttacagccgccgcgcaccgcatcttccacggtgactatctggcggtattgcccgtcggcgcacagctggccgggggccagattgttgtgggacaggtcgatgtccaccttatcggctttgttacgcccacggttgaacagcgcaccggaccagaacggataagcactgtgtgtcaggctggatggcgtggaaaaataggtttgtcgccattttttgtgaatagccataccggaagccactttgcgcagctcctggaatttcggtatccagaaatattcatccagatacaggttgccgtggtaactctgggccgtgcgggcattggtgccgaggaagtaaagcgtggctccgttaggaagcaccatcggatcgcctttcagctccacctcgacttctttggcgaagtcgatgatgtactgcttaaagacgtgagcctgtgccttactggcagaaaggaaaatctggttacgtccggtaagcagggcgtcaatcagggcttcacgggcaaagtaaaaggtcgcgccgatctggcgtgacttcagcaggttgcggatgcggttggtttttccggcttcccaccagtggcgctggtagttgaacatggaggaatggaagatttcttccagcttctcaatctgttcatcggtgaagacattcttttccggctgacggcgcgggcccttgttgcggttggcgacgttaggatttaagtcggcttcgttgccgccattgttaaacttgccgatccgcgcgtggcgttccgactggcgcgccagcaggtcaatctctttgaaatctttcccttctttgtgctccttcataatgagctggcagtagcgtgcggcggtggtgagctgcatctgatccagcggcccatagtcaccccacttgtcgcgttttttccagctgtgaacggttgcaactttctcgcccagcatttcagcaatgcgggcgacgcggtatccctgaaagtacagcagcatggcctgccgacggggatcgagatctgcgggtgtcagtgtggtgttcatggcacaaacctacagccttgaatgaaggctttccccgcctgcggtttgtgtggttgtcggtacaaataccgcgcattgtttcactgcccccatcaccgcaaccataaggctccagtaagttttttctaacggagcacggctcatgacagtgaaagcaaagcgttttcgcatcggggtggaaggtgccaccaccgacggacgcgaaatccagcgtgaatggctggaacagatggcagccagctacaacccggcggtgtataccgcgctgattaaccttgagcacatcaagtcttatctgccggacagcacctttaaccgctacggcaaggtgacggcgctgtttgctgaagaaatcacggaaggtccgctggcaggcaagatggcgctgtatgccgacgttgagccaacggagtccctggtggaactggtgaaaaaaggccagaaattattcacctctatggaagtcagcccgaagtttgctgatacgggcaaagcctacctggtcgggctggctgccactgatgatcctgccagtctgggtacggaaatgctgacattcagcgccagtgcagcccataacccgctggcaaaccgcaagcagaatcccgccaatctctttaccgccgcagaggaaacggtgatcgaactggaagaaatccaggaggacaagccgtccctgtttgcccgcgtcacggcgctgttcaccaaaaaagagcagtccgacgatgcccggttctctgatgtgcataatgccgtggagctggtcgccactgagcagcagaacctgagcgcacgcaccgaaaaatccctgtctgagcaggaagaacgcctgtctgagctggagacagccctgcaggcacagcaaaccgcctttaacgaactggtggacaagctgagtcatgaagacagccgccaggactaccgccagcgtgcaacaggcggtaacgcccccgttgacactctgaccaattgctgatggagcacaaaacccgatgaagaagaatacccgctttgcttttaacgcttacctgcagcagctggcgcgtctgaacggtgtggcagttgaagaactgtccagcaagttcactgtagagccgtctgtacagcagacgctggaagaccagatccagcagtccgccgctttcctgacgctgattaacgtcacgccagtgactgagcagtctggtcagttgctggggctgggtgttggcagcaccattgccggaaccactgacaccaccgcgaaagagcgtgagcctgtcgatccgacgctgatggttgatgtggaatataaatgcgagcagaccaactttaacacggtgctgacctacgcgaagctggacctgtgggcgaagtttcaggatttccaggtgcgcatccgtgacgccatcgtgaaacgtcaggctctggaccgcataatgatcggctttaacggcgtgaagcgtgcgaaaacctccaaccgtagcgaaaacccgctgctgcaggatgtgaacaaaggctggctgcagaaaatccgtgaagatgcaccggatcacgtcatgggcagcaccaccacgggcggtgaaaccacaccgggtgcggtgaaagtcgggaaaggtggcgaatatgccaacctggacgcagtggtgatggatgcagtcaatgagcttatcgacgtggtctaccaggacgatgacgatctggtggtgatttgcggtcgtgaactgctgtctgacaagtatttcccgctggtcaacaaagagcaggaaaacagtgaaaaactggctgccgatatgatcatcagtcagaagcgcatggggggcctgcaggccgtgcgtgcgccgttcttcccgccgaatgcgctgctgatcacccgtctggataacctgtccatttactggcaggaggacacccgccgccgttcggttatcgacaacccgaaacgtgaccggattgaaaactttgaatccgttaacgaagcctatgtggttgaggactaccgctgcgcagcactggtggaaaacatccagattggcgacttcagcgccgccgccgcagaagccggagcataaaccatgagcctgagtccagcacggcagcatcgcctgcgcgttcaggctgaacaggccgcccgcgagggcggcagtgttcgccacgcgtcgggctatgacctgatgctgctgcaactggcggaagaccgccgccgtctcaagggcgttcagtccacggtcaaaaaagcggaaatcaaggtggagctgctgccgaagtacgccgcctgggcggagggcgtcctggctgccggaggcgctcaacaggatgacgtgctgatgtacgtgatgctgtggcgcattgatgccggagattatgccggggcgctggagatcgggcgtcatgccctgcgtcatggctgggtgatgccgctgggtaaccgcaacgtgcagaccgtgctggcagaggaaatggcagatgcagcgcagagcgcaatgcttgccactaccggctttgatgtcgatctgctgctgcagacgctggagctgacagacggtctggatatgccggaccagtcacgggcgcgtctgcataaagcgattggcgctgtcctgagtgaaagtaatccggcttccgcccttaatcatctcaaccatgcgttacagctcgatccccgctgtggcgtgaaaaaagacaaacagcagctggagcgcagactacgcaatgacagccgctgacagaacgtgcccccgcgcacgggcggcacggggtggcgaaaggcactgccacatcaaaaccccgtccaccgccctctatttcaggagaaagcagcatgaagtttgttgcgccagaacaggcaccggaacaggcggaaatcatcaggaatacgccgttctggcctgatgtggagctgtcggagtttcgcagcgtgatgcgcactgacggcacggtgacgcagccgcgtttaaagcaggttgcgctgtcggcaatttcggaggtcaacgcagagctgtatgagtttcgcagacgccagcagatgctggggtatgcctcgctggcagaggttccggcggaacagctggacggcaaaagtgagcgcattcagcactatttcaacgcggtttactgctgggcacgcgccatgctcaacgaacgttaccaggactatgacgccacggcgtccggtgtgaagcggggcgaggaactggcggaagccancggtgatttgtggcgtgacgcccgctgggccatcagccgggtgcaggatgcgccgcactgcacagtggagcttatctgatgaaagtgcgtgcgcatcagtatgacacggtggacgcgctttgctggcgtcattacgggcgcacgcagggtgtcacggagcaggtactgaaggcaaatccggggcttgccgaatacggcccctttttacctcacgggctgcaggtggagctgccggacattccgaccaccaccaccgtgcagaccgtccagctatgggactgaattatgacgcttgagcgaatcagcgcctttatcacgtattgcatcgccgtcgtgctggcctggctgggcgatttgtccatcaaggatgcctcaacgctgggcggcctgatgattggtgtgctgatgctggctatcaactggtactacaaacacaaagcctaccggcttctgcgcgacgggcagatctcgcgggaggactatgaatccatcaatcgttaaacgctgccttgtcggggccgtgctggctattgctgccacgctgccgggttttcagcagctgcacacctccgtggaagggctgaaactgattgccgattacgaaggctgtcgtctgcagccgtatcagtgcagcgcgggtgtatggactgacggcattggtaatacgtcgggcgtcattcccggcaaaaccattacggaacgacaggcagcagaagggcttatctccaacgtgctgcgtgtggagcgggcgctggaaagatgtgtgaagcaacagccgccacaaaaggtgtatgactcggtggtgtcgtttgccttcaacgtggggacaggcaatgcctgcagctccacgctggtgaaattgctcaatcagcggcgctgggcggatgcgtgccgacagttgccgcgctgggtttatgtaaaaggtgtgtttaatcaggggctggataaccgccgtgcgcgggagatggcctggtgtttacagggagcaaactgaaatgaaaaagaaattaatcagcggactgtttctgatgttatggatggcgttgttaatcgcagcaatggtgtatccgcaggggatttttccggtactggcagcgtccggcgtttgggtagcctgtttgctgacatgggcggtaattccggtagcactggctgcgttaattaagaatagcccgctctggcaggagttaagggcatctttgctgaagacaattacccgaaaagaaaacgtatttatcagttgggtgatgcgattgctgattgtcgtaagtctcgcctggacggggtgggctattaccctggtcttttatctgctgaccgttattgccttctggatcacccgtaatcagatggcgcaacaggtagcagcatgaaccggttgctgctggttgtgctggcgttattactggcggcgctgggctggcagacgtggcggctggctgatgccagccagaccatcagcacgcagtcagacgagctgcagagcaaaagccaggcactggcaaagagcaacagccagcttattagcctgtccattctgactgaaaccaataaccgggagcaggcgcggctctatgccgaagcagaacagaccagcgcgctgctgagacaacgacaacaccggatcgaggagctgaaacgtgagaacgaggatttacgccgctgggctgatactcctttgcctgctgacattatccggctgcgggaacgtccgacactcaccggaggtgcagcttaccgtcagtggttgtccgcgagtgacgccgtgtcggctggagcaggcaacgccgcgcactaacggtgatctggacgcgttgctggatgaaacggaggccgcctgggcggtctgtgcagacaaagtggacatgattattgcgtgtcaggagcgaaacagtgaacaaaccacaatccctgcgccacgccctcaataaagcggtgccttatgtccgcaataacccggacaaactgcatctgtttgtggataacggttcgctggttgccacgggggccagctccatgtcgtgggagtaccgttacaccctgaacgcggtgattgaggatttcagcggcgaccagaatctgctgatggccccggttttgctgtggctgagggataaccagcccgatgccatcaataacccggcgttacgggaaaaactattcacctttgaggtggatattctgcgcaacgatgtctgtgatatcagcctgaacctgcaactgacggaacgtgtgctggtcagcactgacggcagtgtgtcgagcgttgaagctgtagcggaacccgatgaacctgaagaaatgtggacggtgaaacgtggctgaactgcagaaggtggacgactggctgagtgctttgctggcgaatctggagccagccgccagaagccgcatgatgcgccagctggcgcaggaactgcgccggacacagcagcagaatatcaggatgcagcgcaaccctgacggcagcagctatgagccgcgacgggtaacagcacgaagtaaaaaagggcgcatcaaacgtcagatgtttgcaaagctgcgcaccacaaaatacctgaaaaccgccgccagcgcggattctgccagcgtacagtttgaaggtaaggtgcagagcattgcccgcgttcaccattatggcctgcgtgatcgcgtcagccgcaaaggaccggaggtccgttacgcagagcgtcgccttctgggtgtaaatgatgatgttgaggcaatgacccgcgacatgattctgcaatggctggcggggtgatctttgtatcagcactgatacaagttgcagcactgccgcctttcttcccctgatggcaacctttccctatgaacgcacaattaaccgaaatcatgcgccttatcaccaacctgatccgcactggggtagtcaccgaagtggacagggaaaactggctttgccgggtgaaaacgggcgagcttgaaaccaactggatcagctggctgacgctgcgtgccgggaatgcccgcacatggtggaaaccatcggaaggtgagcaggtggtgctgctgagtctgggcggcaatctggagactgcctttgcgctgcccgctgtctattcgaatcagttcgcaccaccgtcgacgtcggcggacgcctgcgtgacagaacatcctgacggtggctggtttgaatacgaacccgccaccgggcgctggtatgtcaggggcatcaaatcaatggtcattgaggccgctgacaacatcaccatgaaaaccagtgagtttgtactggaagctgaccgcacgcgtattaacagcgaagtagtaatcaatggtggcgttacccagggcggcggtgcaatgagttctaacgggatcgtggttgatgcgcatcagcatactggcgtcctgaaaggcggcgacacaaccggaggtccggtatgacgctttatatcgggatgaacaataccagcggtaaagccattactgatattgaccatctgcgccagtcggtgcgggacattctgctgacgccgcagggtagccgcattgcccgtcgggaatatggttccctgctgtcggcgctgatagaccagccacaaaatccggcgttacgcctgcaggtcatgtcggcagtgtatgtggcgctgagtcgctgggagccacggcttacgctggactccataaccatcaacagccattttgacggttctatggtggtggagctggccgggcggcggaataacggtgtgcctgtgtccctttccgtatcaacaggagcagagaatggcagtgattgacctttcgcagttgcctgcgccgcagattgtggatgtgccggactttgagacgctgcttgctgaacgcaaggcagaatttgtggcacttcatccgaaagatgagcaggaagcagtgatgcgtacgctggaacttgaatctgaacccgttaccaaattgttgcaggagaacgcttaccgtgagttgcttctgcgccagcgcattaacgaagccgcgcaggcggtgatggtggcttatgccatagggggcgatctggaccagatcgccgccaattacaacgtgaaacgcctgacggtgacacctgctgatgatgacgctgtgccgcccgttgcggcagtgatggaaagcgatgaagcgttgcgcctgcgtgtgcctgcagcctttgaagggctttcggttgcggggccaacagcagcttatgaatttcatgcccgaagcgccgacggtcgggtggcggatgccagtgcaaccagtccggcacctgcagaggtggtactgactgtcctgagtcgtgaaggcgacggaacagcagaaaaagacttgctggatgtggtggagaaagccctgaacagtgagaacgtccgcccggtggctgaccgtctgacggttcgcagcgcagaaatcatcacgtaccgtgtggaagccaccatttttctttatccgggaccggaagcagagccggtaatggcagcggcaaaagtcagcctgcagaggtacatcgccagtcagacgcggctcggtcgggatattcgccgtagtgctatttttgccgcgctgcatgttgagggtgttcaacgtgtggagctggcttcaccgctggctgatgtggtcctgaacaaaacacaggccgcatcatgtacgcagtggagcgtaaccaacggaggaacggatgaatagtctgctgccaccgggttcaacttcactggagcgacgaatggcccaaacctgcagcgggatttctgatctgcaggtgccgctgcgtaacttgtggaatccggcaacctgtccggtcagtttcctgccttatctcgcctgggcgttctctgtggatcgctgggacgagagctggacagaaagcgtcaagcgccaggyggtgaaggatgctttttatattcatcagcataaagggaccaccagtgccgtgcggcgggtggtggagccgttcggctttctgatccgcattattgagtggtggcagaccggagaggcaccgggcacgtttcgcctggatatcggcgtgcaggaccagggcatcactgaagatacctatctggaacttgagcgactgataagcgatgccaaaccatgtagccgtcacatgatcggcatgtctatcaatctgcaaaccagcggcccgcattgggtgggagccgccagctatcttggcgaagaaatcacgatctatccgtatatcaacgaaacaattatttccggcggcaccgcgcatgaaggcggggcggtccatgttattgacacaatgagagtgaatccatgagcacaaaattttataccctgctgacggatattggcgcggcgaaacttgccagcgccgccgcgctcggtgtgccgctaaaaattacccatatggcggtgggcgatggcggcggagtattgccaacgccggacgcaaagcagacggcactggtaaatgagaaacgccgggctgcgctgaatatgctctatatcgacccgcagaacagcagccagattattgctgaacaggtgatccctgaaaacgagggcggttggtggatacgtgaagtgggcctgtttgatgaatccggggcattgattgccgtgggcaactgcccggaaagctataagccgcaactggctgaaggcagcgggcgcacccagaccgtgcgcatggtgctgattaccagcagcacggacaatatcaccctgaaaatcgatcctgccatagtactggcaacccgcaagtatgtggatgacaaggcactggagctgaaggtgtacgtggatgatcagatggcaaaacatcttgccgcaccggacccgcattcacagtacgcgccaaaagccagcccgacatttaccggaacccccaaagcgccaacgccagcggcggggaataataccacgcaggttgcgaccactgcgtttgtacaggcggcactgacggcccttattaatggtgcgccagccacgctggacacgctgaaagaaatagccgcagccattaacaatgatccgaatttcagcaccaccattaacaatgcgctggcactcaaagcgccgctgtcgagtccggcactcaccggaacgccaacagcccccacggcggcgcagtcggtcaacaatacacagattgccactacggcttttgtgaaatcggcgattgcaggaatggtgggttctgcacctgcggcactggatacgctgaacgaactggcggcggcgctggggaatgacccgaactttgccacgacaatgcttaatgcgctggcaggtaaacaaccgctggacaatacgctgaataatttgagtggaaaggatgtagaaggaattcttacttatcttggtttggggcatttgggaaatgcggcaggtagaaatgttggtaatgctaatagttatgaaatccctgacatgagctattttcagctaacaggaaaaggaagcgataatttgttggttaaaggtccgaatggtttaattatacaaatatttcgaagaaatcttcctaatagtacaactattggtattccacaacagcttgctattacatatccaacgccattccctaacggagtatggggtgtgtttgtcacaaaaatgacatatgcacaagtcgttacgtcgtgcgaaagtatatataatgatggctttactgctgtaacttgtttgacatcaggaaccagtagtgattcaaaagtttcaagcgctgtatttattgcatttggatattaaatatgaaaagttatgatgattatcaacatgattcttcttatggttttatatgggataaggtaaatgccagatttatggcgtatatattaaaaaatgaatatgaaagaaatagaatgtggcctaaggaaggggtggatatttcaaatgagactgcttgtgaattcatgaaacaacctccggaaggaaaaattcttggggcagatgataatggtatgcctgcatggattgatatgccaccactcacatatacagagttagtggctaaagcaaaaactgaaaaacaagcacgtataatagaagctgtaaattatataaataacaaacaatggcaggggaaagcattgcttgggagactgaatgatactgaactgaaaatgtataatatatggcttgattatattgaagcattagaggccattgatccatcaaaagcctctgatacagcctttccgactaagccatttaacgattcagtctgagaattggattaacaaacaaccgatcaataatcaagcttaaaccaaggctgataaaaaaaatgactaaagacagggatgttgtttttagtaaaatgttatccacgataaaaggaatattgaaatatttctctaacactctgaaaacacaaacatgaattaaataaattccgtatgttagaggtgctattttttcaatggttaaaattatttttttattattgatgtttatttttgtaaatgcaattactatcaaggaacacagtaacaacatattaatccctgagtcaaatgggtatatgttaaagttatatttgttaacgctaaaataaacaaacatcacatgtagtaaaaatataaaagggatgctatatacaatataatgtgttttaatgtcaactctttttaataatccgccgacaacaaaatataaaacccatgtatctatgctctgtaatgggattaaatgatggtagtattgagaggattggcttagagagtatgagtataatgaataataaaaaatgaaagccaaaactataatcaccttaaggctgtcggcttgtgggattttattgactatgtattgaattgctggagcggttaaatacaaaccgataaaggcataaacaaaccagaaatgcacagagagtgaaatagtgcttttagatattaatgagaaatattcaagtaaattcgatgacgttccattattccagctaatgatatagtaatgtgctaatgaatatattacaaaagggataataatggcgggggattctttttttataaaacaaaagtggagtgctattttgtctgttgagtaggtagtatccacgttaacataaagaatattggtaaaccaatgcgtacaattgattgtgcaaaaagagtttgtatttgtakactttctgtttggttactggtaacagtataagcgtagtcgggcagtgacatgaattcctattacaaaaatacaacaaataatacgtaacagatctaaagaaatatctcttttcatatagtattcaatctgatttaaatggatgacagatgcgcaatagtaaaatagatttgcgtataataatcaatacatattgagatatattgattattttatgaaaagccctcatggtgctgttgtgccatttcccatacaatccccatcgcgtgcaccctgcgcgtatcaaccagaacataggcagaccccctctacaaccggagagactgccttatggctcaggattaccaccacggagtgcgcgttgttgaagtcaacgaaggcacccgatccattaccacggtgagcaccgccatcgtgggcatggtctgcacgggcgatgatgccgatgcaaaaatgtttcctcttaataaacccgtgctgatcactgatgtgctgactgccagcggtaaagcgggtgagtccggcacgctggcccgttcgctggatgccatcgctgaccaggcaaaacccgtgaccgttgttgtgcgtgtgccgcagggtgaaacggaagaagaaaccacaaccaatatcatcggcgcagtgaccgccgagggtaaaaaaacaggcatgaaagccctgttatctgcccagtcacagctcggcgttaaaccgcgcattctcggcgtgccaggtcacgataacaaagccgttgcgactgagttgctgagcgtggcgcaaagcctgcgcgggtttgcttacctgtcggcgtatggctgcaaaacagtggaagaagtgcttacctaccgcgaaaacttcagtcagcgtgaagggatgctgatctggccggattttatcagctgggacacggtgctgaatgccgaagcaacggcatatgccaccgcgcgtgcgcttggcctgcgcgccaaaattgacgagcagaccggatggcacaaaagcctgtccaacgtgggcgtgaacggtgtcaccggaatttctgctgatgtgttctgggatctgcaggacacggcaacagatgcaggtctgcttaaccagaacgacgttaccacgcttatccgcaaagacggttttcgcttctggggttcccgctgtctgagtgatgatccgctttttgcctttgagaactacacccgcacggcgcaggtactgatggacacgatggcagaagcgcacatgtgggcggtggacaaaccgctgaacccgtcgctggcccgcgacattatcgaaggtatccgcgccaaaatgcgcagcctggtcagtcagggctatctcattggtggtgattgctggctggacgagtcggtgaatgacaaagacacgctgaaagccggaaaactcaccatcgactacgactacacgccagtgccgccacttgaaaacctgatgctgcgtcagcgcatcaccgatcagtacctggtgaatttcgccagccaggtcagcgcgtaaggggacaacatggctttaccacgcaaattaaaacacctgaacctgtttaacgacgggaacaactggcaggggatcgttgagtcgctgacgctgccgaaatttacccgcaaatatgagaagtatcgcggcggcggaatgccgggtgcggtggatgtggatctggggcttgatgacagtgcgctggacacagaattttccattggtggtactgaattgctgctgtttaaacagatgggtaaagccacggtggatggcatccagctgcgctttaccggctctattcagcgtgacgataccggggaagtgcaggccgtggagcttgtcgtgcgtggacgtcacaaagaagtggattccggcgagtggaagacgggcgaaagcaacaccaccaaagtaaccagtaccaacagctacgcgaagctgaccatcaatggtgaggtgctctatgaagtggaccttatcaacatggtggaaattgtggacggtgtggacctgatggaagcgcaccgcaacgccctcggcctctgatatatctgaacggcgcgggataccgcgccagaacccaattgacaggacagcaaaatgagcgataagcagactgaaaagaccattcaactggatacccccatcaagcgcggtaaaacagaaatcaccgaaattgtgctgcgtaaaccgcagtccggtgcgctgcgcggtacacgcctgcaggccattatggatatggatgtaaacgcgatgatgaccgtgatcccccgcatctccagtccggcactgactgcacaggaaattgcagagatggacccggcagatctcactgccatgtcggttgaggttgtcacttttttgttgaagaagtcggtgcttgccggtttaccgacagcctgacggttgacgatctggtggcagatatcgccaccatttttcactggccgccatccgttactgacgttatgccgctgaccgaagtgctggaatggcggtataaagcgattcagagaagcggggccaacgatgagtgataacaacctgcgtctgcaggtcattcttaatgcggttgacaagctcacccgcccatttcgatctgcgcaggccagttcaagagaactggctgctgctgtcaaaaaatcccgcgatgcaataaagcagcttgatcaggccgggagcagtctggacagcttccgaaagctgcaggcagaaaatcagaaattaggcgacaggctgaactatgcccgccagcgtgcaaatttgctcagtcaggaactgggagcgatggggccgccttcgcaacgtcaggttgttgctctgggccgtcaacggctggctgttcagcgcctggaagaacgccagaaaaagctgcagcagcagacggcgcttgtgcgtgctgaactgtaccgggcgggaatttctgcgaaagacgatgcgggagcaactgcccgtttagcccgtgaaacatcacgttataaccaggaactttcgaaacaggaggcgcggctgaagcgactgggggaagctcagcgcaggatgaatgcagcgcgtgccagttatgcccgttcgctggaggtgcgtgatcgtattgcaggtgccggagccaccaccacggctgcagggctggcaatgggtgcgccagtgatggcggcagtaaaaagctataccagcatggaagatgccatgaaaggtgtggcaaagcaggtcaatggtctgcgtgacgataatggcaaccgcactgcacgtttttatgaaatgcaggatgccatcaaggctgccagcgaacagttgccgatggaaaacggtgcggtggacttcgctgcactggttgaaggtggtgcgcgcatgaacgtcgcaaaccctgacgacagctgggaagatcagaaacgtgacctgctggccttcgccagtacggcagcaaaggcggcaacagcctttgagctgccagcggatgaactgtcagaaagtctggggaaaatcgcccagctctacaaaatccccacccgcaatattgaacagctcggtgatgcgctgaactatctggatgataacgccatgtcgaaaggggcagacatcattgatgtgatgcaacgtctgggcggtgtggctgaccgtctggattatcgtaaagcggcggcgctgggttccaccttcctgacactgggcgctgcgccagaggttgcagccagtgcagcaaacgcgatggtgcgtgaattgtccattgccaccatgcaaagcaagagtttctttgaagggatgaatctgctgaaactcaatcctgaagtgattgaaaagcagatgacgaaggatgcgatgggaaccatccagcgcgtgctggagaaggtaaacgcgctgccgcaggacaagcgcctgtctgccatgactatgttgtttggtaaagagtttggcgatgacgcggcgaaactggcaaacaacctgccggaactgcagcgtcagttaaaactgacagcgggcaatgatgcgctcggctccatgcagaaagaatccgacattaacaaggattcactttctgcgcagtggttgctggtcaaaaccggagcgcagaacaccttcagcagcctgggcgaaacgctgcgccagccgctgatggatattctgtacacggtgaaaagcgtcacgggggcgttgcgtcgctgggtggaagctaacccggaactgacaggcacactgatgaaagcatcggctgttgtggctgcggttaccgtcggcctcggcaccttagcggtggcgctggctgcagtgctggggccgctggcagtgatctgtctgggattctctgtgttgggtatcaaaacgttatcttccgttacggcagcagtaactcgaaccagcagcgcgttgtcctggctggctggcgcaccacttgcactgctgcgacgcgggcttgcttcatcgggtaacgcagcgggtttacttactgcgccgttgtcgtctttgcgccgcacggcatcactgacaggaaatgtcctgaaaactgtagcaggtgcgccggttgcactgttccggtctggattatccggtttacgtgctgttgctgtgatgtttctgaatccacttgcagcactacgcggcgggctgactgccgcaggctcggtgctgcgagtgctggcatccggtccgctggcgatgctgcgcgttatcctgtatgccgtgtctggtctgttaggtgctctgctcagcccgataggtcttgtggtgactgcactggcgggcgtggcgctggttgtctggaaatactggcaacccatcaccgcatttctcggtggcgtggtggaaggattcaaagcggcggcaggtcccatcagtgcagcgttcgaaccgcttaagcccgtgttccagtggattggcgacaaagtgcaggcgctgtggggctggtttactgatctgctgacgcccgttaagtcgacctctgccgaactgcagagcgcagcggcaatggggcggcgattcggggaggcactggcggaagggctgaatatggtcatgcatccgctggactccctgaaatccggcgtttcttggttgctggagaagctcggcattgtcagtaaagaggccgcaaaggcaaaactgccggaaagcgtgacgcgtcagcaacctgcgaaggtgaatgcagacggtaaagtgatgatgccatcgggtggttttccatcatggggatatggctttgcggggatgtatgacagcggcgggtatatcccgcgcgggcagtttggcatcgtcggtgaaaacgggccggaaattgttaacggcccggcaaatgtgaccagccggagaaatacagctgcactggctgccgttgttgccggaatgatgggcgttgctgccgcgccagcagagcttccaccgttgcaccctttggcacttcccgcgaaaggtggagaagtaattgtgagtcgcgcagccactgtgccgctcgttcaacggattgaggcaccgacgcagatcatcattcagacgcagccaggacaaagtgcgcaggatattgcgcgggaggtggcacgccagcttgatgaacgtgaacgcaggctgaaggcaaaagccaggagtaactacagcgatcaggggggatacgacgcatgatgatggtgctgggattgtacgtgtttatgctgcgcaccgttccgtatcaggaactgcagtatcaacgcagctggcgacatgcggcaaacagtcgggtaaaccgacgtccgtccacgcagtttctgggaccggacaacgacatgctgacgctttctggtgttcttatgccggagataacaggtggcaggctgtcgttgctggcacttgagcagatggcagaacaggggaaagcatggcccctgattgaaggcagcggcacaatttatggcatgtatgtgattgagggactgaatcagactaaaacggagtttttccgcgacggtatgccgcgccggattgagttcactctgtcgctcaaacgggtggatgaatccctgtccgagatgttcggtgatctccgttcgcagctgaataatctgcaggacacggcaacgtctgccttaagcgatatcagtaaaacggtgggagggctgctgccgtgaatttcagctctgaactgcttaacaaaggcaacaaaactccggcattcagcatcagtattgagggcagggatatcactactgtgctggataacagcctgatgagtctgacgctgacggacaatcggggctttgaagcagaccagcttgatctggagctggacgacgccgacggaaaaatcgtgctgccgcgccgtggtgcggtcattacgctggcgctgggttggaaggggcagccgcttttccctaaaggggcattcacggtggacgagattgaacatactggcgcaccggaccgcctgactatccgggcgcgaagtgctgattttcgtgaaacgctgaatatccgccgtgaaaagtcgtggcacaagaccaccgttggggaagtggtgaaggaaatagctgcgcggcacaaactgaagatggcattgggtgaagacctgtcggataaacctgtggagcatatagaccagaccaatgagagtgacggcagttttctgatgcggctggcgcgccagtacggtgctattgcgtcggtgaaaaatggcaatctgttattcatccggcagggacagggtaaaagcgccagcggtaaaccactaccgattatcactatcacacgtaaggacggcgacagtcaccgctttaccctggcagatcgcggagcctacacgggcgtaattgccagctggttgcatacccgcgaacccgcgaagaaagaaagcaccacggtgaagcgtaagcgcaggactaagaagcagaagaaagagccggaagcgaagcagggcgattacctggtgggtacagatgaaaacgtgctggtacttaatcgcacctatgccaaccggagcaacgccgaacgggcggcgaaaatgcagtgggaacgcctgcaacgtggcgttgcgtcattctcgctacaactggcagaaggtcgggcggatctctacacggaaatgccagtgaaagtcagaggctttaaacagccgatagatgatgcggaatggactattaccaccctgacgcatactgtcaatccggataacggttttacgaccagtctggagcttgaagtgaagattaatgatttcgaaatggaatgattcttcgtaatagagaacttttaagttttcaaaatggaataatgcggtatcattattgtgaatttagcaaaaatggggagaactcgaaaaatgatgatttgcccactgtgtggaagtgccgcccatactcgcagcagttttcaggtatcttcattgaccaaagagcgttacaaccagtgccagaacattaactgcagccatacttttgttacccatgaaacttttgttcgttcgattgcaacgccaaaagagtcaaatccggttcagccgcatccaatgaaatcaggacaggtggcgctctctctttgactctgccgccaatttgtcgccatcgttaaaaaacagtgcttctaacatcatgattttaaacggcataaatttcaggc

SEQ ID NO: 144 - DNA, 216 bp, Escherichia coli
cttttgagccaaaatgcttgacgcgtcttatcaggcctacaagtccgttgaaattgctggttttgtaggctggataaggcgttcacgccgcatcaggcagtcgtgcccaactgcctgatgcgacgcttgacgcgtcttatcaggcctacaatcccgttgaaaatgctggttttgtgcgccacatccggcatattaaccatgacgtcgaatcggttg

SEQ ID NO: 145 - DNA, 69 bp, Escherichia coli
ggcgtccgcgagtcgaaatgatttatctgaggaagaaaagccaaaaaaagcataaaaaaagcgcaataa

SEQ ID NO: 146 - DNA, 226 bp, Escherichia coli
taagcgtcgcatcaggcattatggcgcagttgccggatgcggcgagaacgccttatccggcctacgggaacagtgctttttgtgggcctgataagatgcgttaagcgtcgcatcaggcattatggcgcagttgccggatgcggcataaacgccttatccggcctacgggaacagtgctctttgtaggcctgataagacgcgttaagcgtcgcatcaggcaacaaac

SEQ ID NO: 147 - DNA, 87 bp, Escherichia coli
aggcgttttaccgaaaatttcacgtcataaccggaagcaggcagagggcaatcagtgattgccctctgcgttttttctcaaaatatt

SEQ ID NO: 148 - DNA, 39061 bp, Escherichia coli
  misc_feature (35920)..(35920): Unsure
gtagtaaaagaggcagaaattcttatcaaccgcaaggatgatgaatgagtctgtcgctagttgtcgacctccgcctggggcttctcatccccccggtctatgcaatatacgaaaaaaaagctcgtactttcgtacgagctcttctttaaatatggcggtgagggggaccgcctgaaataaatctgacttaatccaggggggttatataatttcattataaacaatgtattacactttttgttgtccgatattatctaatgtattcttagtgaagcgagagactaatggcatactggatggcataccagagtgacgggaattagcgtatggcagtattgacggatacgaaagcaagacatatcaaacctgatgacaaaccattgccccatgggggaattaccggactgacccttcatccttcttcagtaaaggggcgggggaaatgggtttttcgttatgtaagtccggtgacacaaaaaagacgtaatgctggattgggaacttacccagaggtcagtattgctgaagctgcacgtactgcccggataatgcgagagcaacttgctgcaggtgatgatcctctggagattaaaaaggctgaatctgagaaagtcgttatcccaacatttgccgatgcagccaggcgtgtacatgcagaactgtctcctggatgggaaaatccaaagcatgtaaggcagtggttatcgacgcttgagaattacgcgtttcctcaactgggagcaaaaacgctggattcgattacggctgcggacgtggcagaaacactgcgtccagtctggttaaccttgtcagaaacggcaagccgggttaaacagcgcattcatgttgttatgcagtggggatgggcgcacggtttttgtgtggcaaatcctgttgatgtggttgaccatttgcttcctcagcagacaagaggacgtgatgaacaccaacccgcaatgccctggaggcagttaccgctttttgtggcgaccagtgtgtatagtgatgaaccttataatgttacccgcgcactgttattaatggtgatacttacagcaactcgctcgggcgaagccaggggaatgcgctgggctgaaattgattttcataagcgggtatggactatacctgcagaaagaatgaaagctaggctacagcatcgtgttcctttatcccggcaggctatttacattctggaaaatatacgtggcctgcatgatgaactggtgttcccttcacccagaaagcagcagatcctttccgatatggtgttgacaagttttctgcgtaaaaagaaagccgtcagtgacattccggggcgagttgccacagcacatggttttcgctcaacattcagggactggtgtagtgaacaggggtattcgcgggatctggcggaaagggcgctcgctcatacgctgaaaaataaggttgaggcggcatatcatcgtactgatctactggagcagcgtgtaccgatgatgcaggcatgggcggattatgtgatgtctcaaattgtgaataaataatagtgaaaatgtatattgtacgatcatgatttgatatgtgatcgtggcagtagtaattaaggaaccgcttttatgtcaaatgtattgagctgataattatcagatcgtcaggaaagcgtatttttataaacaggggattactcaacaatctcctgtttataaaaaacaatttgcctgttttaacgtttcactcctgctgagactgaattattcctagtgcgtcataaatcagtcttctgcgtagtttattgtttttatctgcaccatataacataaatatattttcaactttttcttcaggtgttctgagataatggataagaaaggttatcattccaacacaatggaataaagtgaatccatcaaacaggcttatcaggtttccttttttttcccgtgctgtaagtattttttcgcgggtaagaatatttgccagttcatggggggctgatatgtttctgctgtctataatgttatttattttaccaagggctatatcaacttcctgtaataggttatttatcatagctgagtgaatgttattggtttcatgttcctgacagtttatgaacttataaatcattgagttatacagaaatattactcttcctaataaatatgtgtttgtgtcattttgaagacaggactctgggtattcgtgatccagtgaaataaggttaatggactcgccctgataagtcataaaataattgatgtcatttaataatgctcggatatttacatgatttttactgaattttattttaaatgctatctttagtatagcaaacgcggcaatgataaatccaaaaggtaatttctcatagttcagtttattgatggtgcgatgaacactttcagtctttcctgaagtaagttgtatcaaacagttaacaaattccgtatagccatttaagacataatggcatgaagaatcttttaaagtgttttctatgttttgtaatgtgacgccgttgttcaatgtataaatgtaaccgccaaagacaatgttttcaatctcaacgacacaatttattgttttttgttcaggataaagataaatatcagaaatactatagtctcgtattgcgtcaatggcctcccacgataatgcactgtcaattttcagtgtataaaatggtgagttctcattaggaaagtaatatatgtatttgttcagtgtattcattacatctattgggttggttaaatataataactggcattcatattctgaaacttctctttcgcttatcagcattttatataaagttgccagggcgcttgttaatgaagttcgtctttcgaaagccagtaatatagtgagataataacatgcaacttgaattttatctaagtcagaaattattttttccttgtcttcattacttaaataaagcagatgtttacaggtttctttgcatgtgttgatagttgcggtaagttttgtttttcctggtgtactgtttttgcgaatattacgaatgaattcatatacgccatcaaagatatatttgaaatgcgcattcgctggtgtgtatccggataaacataacttaacgtaatttcgctgatatgtccttgcagcatgatatatatcatcctcattatccggtatctgagtgagaaaagaatgaatatgatagtaaaatgccatctcattatccgggcgatatgtgttcctgatgtcgagtgcgagaatcattggtacaatgtcattaaaatatttttgttttattatttgatgtgttttgtctgtaaaaacagaatagtgcattagcttaacatagagatcttcatatctcctaaatataacttttcgttgttctgtactcaatacttgttctttatcaataatgtttattaattcatcaaacatgtcgcccagtgaatgttgatgtgaggaaaaatttttaatatttcggatgtcacgggtattctggtttttagccagaacaccaaaatatgaaaagacatcatacattatagtgataaaattatacataacattctccttttattgcactatataaaattttaacattatatcattttgcttttctgttaactggttttcatttttgaatcaatattttctgaacagggtaatagtacacgtattaacagattatgtcagaaggccccggtgatgccttctgacgatagattaatgtggtattctattggtatctggagaccatatggcaacagttacagtacattctccccgctgtaattcctataaagtgtaccattatgatcacagcacctcagatcatgagcgtttccagtgctaatcctgcaaacgtgtgtatttcaactgaattacatctacgaaacccgaaaaccaggcattaaagagcaaattgttgaaatggttcataacggagccggggttcgcgatagctccagaacgctgaaggtggatatcaacaccgtcattctcactttataaaacgctcaccacgcaaagtaaccacatctccagtcgccagtgccgatgtgacgcttatctgcgaacttgatgaacaatggagttttgtcgaaaacaaagctcgtcagcagtggcactggtatgcgtataccaccaaatctggaggtgtgctggcttacacttttggtcctcgcactgatgaaacatgtcgtgagttgccggaactcctgaagccattctccacaggcatgataaccagagacaaccggagcagttataccagagaaatgccacaggataagcatcttgtcggcaagatatttacccggcgcattgagcgcaacaatctgacacttcgtactcacatcaaacgaccagcccggaaaacgatttgcttttcacgctccctggaaattcacgaaaagccattggttcatttatcgaaaacactgtactactgactggagtcattaccagggcctcttttgctggttttktaccaatgaatgataatgagaatcgacagcgataaggggaaagtaaaataacaataatgctgwtgwtttctatcgtattgatttttaattatttattgtctttttgctcagcccacttttttacgcagacaaatttacccggggaatacaaactgtaacgacagttcaccacactatgggggataaaatgccagatcaatccggatactgctggactccttcacgcatcttacggatgcctgaactgagccaattgttaggtatatctcgttcgacaatttacgaaaaaatgaatccgttatcgaaatactacgatgcaaccttccccaggccggtacgtcttggtagtggttctgtgggctggcgttcatcagctattgacgaatggcttactttacatactgtacctgccagatcagcagtcaaaggtgttaatgacgaagtgcgacatacgctttcttcagatatgaccatgagcagataagtttttgtcatcacgtgatcacctcaggaggaaaaagaagcataagaacaatttagccagaagtttaattgataaacagaatttccagcattcattgttgaaagagcagctattgtcgctattgtagcggtaattgctgctataaccgaaacgtattacgaaaaaggaagcatttatgtcttacatcaaaccggatatgccgtattcagtatatgcgtgaccatcaatgatagggaaggcaataattaaagctcaatacaataaacaagtacctctgactctggttgcaatgtcagtattaacagcgatgtcaattgcctgtcagaatcaggttgacgtatgcagtcccggaaatttacgtggggccgttaatatttacactatggttctggagaaagggaaaagaccgggggaaaggtattagtgaaataatttctggaggtattaagaatgagaaatatgaatgatatttcgtggtaaataatacagtctgcactgaattaaccttatcggtttattaaacataagatctacaaatgctctgtatttctcagagcatcaggtctgaatagcagctattttcgctattgtagcgggagttgctgctattttactaacccattaatgaaaagagaggcttttatgtgcttacttgcaccagaaaatccttatccgatatatgcactaccaccgctggtgagaaatgcaataattgaaactcaaaaaaatacacaggcacctttggctatggtggcaacatccgcattaacagcgacctcaattgcctgtcagaatcaggttgacgtgtgcagacctggaaatttacgtgggcctgttaatctttactctctgattctggctgattccggtgaaaggaaaacgaccgtggataaagtgtttatgaaagcattttatctcagggatgaagccctggcggaagaatacgcgaaactggttgagaattacagtacagaaaaggaaatatgggagcaaaaacaaaaagcgctggaatcaaaatttcataaagagattcgtgccggtaaagattacaaggcaacagaatcagagcttgaaacgcatctgaataagtctcctgttccgccgcagatacgtcgaacaatttttaatgagacaacgatagagggaatgttaaaatattactccgatagcaatcgttcttttgctcttgtatccagtgaagggggggtaatttttgacagccgggccatgagtaaactgggaattattaacactttgtgggatggaggttctcttttcatcgacaggaaatcatctcccggaattaatttgaaggagccaagactgacgatgtcggcgatgattcagcctgatgtttaccacaaaggtttttgtacgcgaaaaaaagaacttgtgaaaacgtcaggacatcatgcaaggtttttgatgtgtcaaccaacatcaacgcaggggacaaggataataaccggagataattattcatcacagtatcaggagttatttgataagaggatcaatgaacttattgatgaaagtctggctatgagtggtgaacgacgttgccttcacttttctcctcaggctgccagaatctggacggattattacaacgatgtggaatcgaagctggggggattggggcctttaagacattgtcgggaatatgctgccaaaaatgcagagtatatggcaagactggcaggacttcttcaccatttgagcagtgaggagggggacatttccccttacactgcagaaatggggagagaattagcaatatggtacggtaatgagtatatgcggttgtctaatccgttaacttttgacaacactgctcaaaacgagactatgcgactcattccagaggagcttgaacttttcaactggataaaaagctattgcattgagaaggggatcccctgtatgaaaaaaaatgacattttacagcgtggtccgaaccgtttccggaaaaaggataaaatcaactggttactggatttactgtatgaacaaaacagagttgtaccggttattgagggaaaaacgttgtgtgtcgcacctaactttgacctcttaatgacttaatcgttgagtaacatataatctcctctgctacttgcggaggagactaatgcctttaccatgtcagcgttgtattagaaaactctggtacaggtcagtcagtaaatataactggtgtaaccactatttactattggatagagtgttgctcaggatattgtcggctttagtctgaggtgaggtgggaccttcattgttttcgtgttcaataaataatttaggttaattagtattattaatgggagttatgttatctgttatgttgtctctttttatcgtaatgtcactcctctttatgctgggtattctgtatgtgcgtaatgcgtctatccccatatactacagtgtggtggtgtatggggtttagttatgtgtaaattatgttactacactcatagcgtaatattgaaaaagttaatccactgaatgtatgtctggtttgtatttaacactagttacgtaccagaacactattagagtatattgtctttagttcgtacgttatagctccgttacagtttataagtatgggtaaatataatcttttctgtatgaaataatcttcttattgtgaggttaaatatctgtaggctctctctgcagagtctctgtttttacttaatggtacggcaatactaatagcgatgttgcctgtggctattcgatagctgacttttgtgaagatcagattacttcctgtaagtgattgaatggtgctttcttaaactcaattatattgaggtgtgtttttgccattgtaattcttactggtcctctgtttaagagagcctcactgtattctgaagtattacccccattactgtaatgaggtaatacgaaacagttttatcaggttgtctgcatactggttacccagtttattaatgccgtggtacgacgtttctgtatcctcagcatttacgtaatttcctcttcctgtgagttttataaagtaaggactataaaatgtataatgctaaccccaattacgaaatgaatttcacgattctgaaagatgtgaatgaacacatggaaggtctgtttcaacgtttttctaaactgttacctttcagaattgattttgcctacaggaaagacacgcccagtttcgggcattcctgtaagcacagtatgtgtattgaaatataccgtttacttagcgaaacccagacgatgttggcaggatattactgggtaatggaatatacaccagacaaagggcttcatattcattttatcggctatctggatgggcaacgtcacaagaactcttatcagatatccaggcaactgggggatatctggaggcggatcacggaaggggagggttattttcacctttgccgggctaaagacaaatacccggtgcgtatcgatcacgtgattcactatagtgataaatctgcggtagacgacttacgttacgcccttagctacctggctaaacaggatcagaaagaacacggtattattctgaggcgtagcaggctttccgaaaaaagcaaccggggccgaccacgactgaacagtatcctgccagggatatgttctcagctgtaatgttctgaacaacaactacgggctggctcttttttgcccgtcagggcgtcaagctgagccgtgcattattctccaactgggtggacgcatgctgccagttaatggctccgctgaatgatgccctgtaccgttatgtgatgaacacccgcctgggaaccatccacggcacgtcggtcggcgaactgctggcgtggatcaaagaagatgaaaaccctagcaaaggcgagatggtgctgattattgaaggccataaagcccaggatgacgaactgcccgccgatgcgctgcgtacgctggcgctgttgtaggctgaggtgccgttgaagcaagcggcggcgttggcagcagaaatccacggagtgaagaagaatgcgttgtataagtatgcgcaggaacagcagggggactaagcccctgctgccggttttgccgggtggcgcttgcgccttacccggtctacttattgggacaagcgtttagttaatggtcaccgcctcaaacaccagcgtttccagcggctgcaacgtaatcaccgtcgcgtttttatactcaacgggcactgttttattgctgccgtataccgctttcagactaaactgcgccgcgtttcctgccggtatttcgaaatccttcgccaaatccagatagtaggtctgtggcttatccgatgggttgcgcaaaccgagaatggctttgtctttgctccaggatgcccagccgtacacggcaagcgccgttgggtcgccgccaatccagtgggtatcaaccagcacgctggcattttccttcgaccattttgcagccttcgccagcgtatcccacttcaccttgttcagcatggacggggtaatatacagctcctgcagctgggtgccggtcgcgaagtagctccagacctgatcggcaaagtcgctgtccgtttgcaccttctctaacccgtaataggcattctcggcgctgactatcccgtggtacatcagcgagttcagcgggaatagcgggcctttacgtacaatagagcggtatgtctcggcatcacgatatgttatccactgctgcaccggcgtgccggggccatacaggtttatatcatccccctgacgccagatagaatcagcatagaacaaccaggacgggctggcgttggtgccggtggtcaggttgataaatagattcgggtttgctctgcgcatattgtgcagcagagctattgacgcatcaaaatccgaggcgaacgggctaccctttatatgtgaactggcgttccccattccgtcgagtttaaacgaggtaatgtgttcatttttgataagattaatgatctgctcattgaagtttttaaagtagttcgctcccgaaagcgccagcttgccgtccacggtttcgaacccatactcttttgcatgcgaaacgcgaacgtcgctgcggcttattgtaacccccccacggtgaaagccatagcccaacggagctgtgcaggctatcggctttctctcgtactttgctaaaaccgttgctgaatgccgggccaaataaccagcgtccggtaagatcgtcccagccatcgtccagcagaaaagcgtctaacgccactccgcggccgctaatgaattccttgttccattcgtccatgcgtcccagaacatcctgttcggtgtacggagtgaaaaagccgatatccatccaactgttgtaatgcaaataaggcttgtacggacgtggacgtacggcattaataaactggttcacactgcgtcgcaactggctggtttccgggaaagtaccgaaccaggtggtaaagctaaccggcgtctctggctgaattggagttttcagttctacgttgagattggttgttgcttcataggcgtaggtattcacgatcggtttattcggcaggataaagaacgagtccgcaatgatcggtgagctagtgattgcgccgtctacgtaaggagcctgaaactgttttttggtcgggaagaaggtaatcttggcgacgtctcgtggttgcccaacggcggcaatagtgtagtcgatgctggcatattttcccttcacaaggttcaactgcactgttacgttaaaatctgggcgcgtaaagtcgatgacaatcgcattgtcctgttttttgatgtgcttgattttgaaatctgcggtgtggatttttgtctcatccggtagtgtcagaaagaacaattcctgtggtgtgatcggatggttagttctacggtccttcagcacaatcgtcgagtttgtatcatcaaacgagagggcaatattatcgttattgaacgtatagtttgctgctactgcactatgagacacacacagagccagtagtgagagagtgagcactttcttcattggtgtaagatccttatctgtaatgttactgcattcggttggtggatcgctccagccagtagcgctgagagccaaaattaatctgtaggtagttttcaccgttttgtacatagtggctgccgtcttctatgaccacgcctgcttgccgtgcgaaatgttgggttagctgcgttgcgctactctcatccgcgcttacgtctatccacgccagatacgacgattccggggtcatcatcttccacgccgggaagtgggtctggagggcatccgccagataccgggcgttgccttgcagataatcgttcagcgcgtcgagccagggcagaccgtgttgataggccagaatgattccccataccccgaacaaattgggcgaggtaatggagttcttctcaagctgctggcggaagcgctggcgcagcgagtcgtctggaatcatggagtaggaggttttcagcccgcccagctttaacgctttgttgggcgatgtgagcacgatcaggttgtcctgggcggcacagccagaggtgagacaactgacgaatttgccatccagaattgtgttcagcgtgaacctcatcgaccaccagaatcgtgccgtagcgttgacagagatcggacacctggcgtatttcttcctcgcgccagatcctgccggacgggttatgcggcgagcagaagaaccacagcgttggacggtaggttttgagctgttcttctatcagattaaaatcaagctgatagcggttttcctccacgcgcagcgggttagccagtacctgcacgccctggcgctgtgccgccatcgcaaaaggatcgtagaccggcgtgttcatcatcacgctgtcacccggtttgcagtacgcctgaatcgtgtagtgcagcgtggataccgtgccgtaggtcaacgtgatccacgatttttccacctcaacctgatgacgtttgcgctggaaggcgatgactgcgtcgtagaattcgtcaaagcaccaggtataaccaaaggtgccgtgctccacgatgcgccggaaaccgtcaatcaccgcaggcggtgaggtgaaatccatatcggctatccacagggggataaaggactccgggacgtcaccgaaacgcgagcaaacaaaggcatggtcccatttacggcacttatcactttgacgctcaatgattttgtcgaaatcaaacatcactcctcctgttaaattaaggcttcaatgccggttttgacgctctgtacctgcgctccgatgatcacctgcacgctatgcgcatcaagcatcgatcatcgcgctgcgtacgccggcgtgaaccttacggcgaatgtcatccaacgattcgtgatgatcgagatgcagtgctagcggcatgtcgtaagtgatcgaatacgcactgcacagggcgtagatctcttccagggcaatatgtttgaacgagccgggggggccccgcgaggagcacgggcgagcgcatttcgctgcacacttcgaggatcgcctggatcgtttcggcgttgtggatgttaaacgtcggtacggcgtaggcgttggcctgcgcatcctgcagaagatatttcgttgagataatgctcataaggggagcctcttaagcccgctatggatgaataatcacaccttgcaccacacggttaatcgtgccgctggcagaggggagatctggcgtattgccaacatgaatcgactgagccagcgcaaagacctgggcgtacatcaggaagcagaacgcctgttccatgtcgataaacgaacgggaaggaggcaacaggatatgcgggcccgcttcgatgatggcatccgtttccaccgcaattgcgatcacgcgcattgcctgacgatcgcggcgcagttctgtcagcagacccaggtcgtactggcgcgtgtaagggtggctggagatgtacaccacgataagcgtttcgctatcgaccagcgattttggtcgcagatgatcaccacccagaatcagcgcatcctgggggaaattcaacgagtcggcgagctgacaaacaaagccgcgaaaatcggcgggcgtcattccggtataaccgctgaactggtccacctgattggaggttgcttcaatcagtaacggcgtttggtttgcactggcgtagcggattgcagcttccagcaccagcggatgtgcggaacaaacggcataaatcccatttgttttgcccgctttgtgctgcctcaccatttctgtcagatgtttcacttgcctctccagttccgattactgcgatattaatctttcgttttgtttcagtttatactgcgtcatggtgagataaaaacaaaacgaaagttgcgggttttctgatctgattcacaaaagaaacataatgaaagtcactaaaacgagagtagcttgcgccaatgggcagtgtgggcttgcatttgcttaatagaaaggcgttaataggcaaaacgaaatgaaacgaaagttttacgaaaggacttactatgagtaataccgacgcttcaggtgagaagcgagtgacaggcaccagcgagcgacgagaacagatcattcagcgtctgcgacagcaagggagtgagcaggttaacgatctgtcggcattgtatggcgtatctactgtgacgatccgcaacgatctggcgtttctggaaaagcaggggatcgctgtgcgtgcctatggtggcgcgttgatctgcgatagcacgacgccgtcagtcgcaatctttttacggtgatcaggctgagcaatcgctgcaaaattaccacttcgatatgctgtttcttggtgtagatgcgatcgatctggagtgcggcatcagcacgcataatgaagatgaagcccgtttaaaccgtcggatgtgcgaagttgcggaacggatcatcgtggtcaccgattccagtaagttcaatcgttccagtttacataagatcattgatactcaacgtatcgacatgatcattgttgatgaaggcattcctgcggatagtctggaaggcctgcgaaaggctggggttgaagtgattctggtcggggagctcgcgtcttcgctgtgattcactatgcccgataaacaagcgttatcgggcataatacaacttgatgtatgaagagaatatcagaccaccggtgccgggttaaacactgccagctggttatgcaatccccattgatccgagaaggttttcttcttcccgctggcgacgtcgagaataaagtggaacaacttccagcccacctcttcaatggtctcttcgccggtagcgatagtgcccgcgttaatatccattaaatcaaaccagcggttcgcctgcccggtgcgggtcgccattttaatgacgggtaccgccatcaggccgtacggcgtaccacggccggtcgtaaacacttgcacggtgatacccgaagccacctgttgcgtgccacagataaaatcgctggctggcgtcgcggcgtaaattaatccgcgtttagtcgggtgttgaccgggcgacagcacttcagcaattgcggttttacccgatttagcaatggagccgagtgccttctttaccacgttggcgaggccgccctttttgttgccccgcgaagggttggcgctgcggtcggttttgcccatatcgggatagttatcgtatcaggccatctcttcgagcagacacctgcccacttcttcattgatggcgcgcggcgttaacagatgaatggcgtcgtgtacatcagtgacttcggagaacatcaccgttgcgccgcagcgcaccagcaggtcagaggcgtagccgacagcggggttagcggtaacgccggagaacgcgtcgctgccaccgcagtgcatgcccaccaccagctcggaggccgggcaggtgacgcgctggcctggttgagtttttccagatggtgtgcggcagcctgcaggatatcgtcgaccattgatttaaagccaacgtgctgttcgtcctgtaggcgtacgatgctggctctgtcgaccgggatgctctgcacatcttccgttcctttctgcaggcgctatggctgtagcttttcgcaaccgagacccaccaccatcacttcgccaccgaagtttgggttcagcgcaatattatggatggtgcgaattggcaccacggcggtcggtgcattaatcgctacgccacagccgtagaggtggttcaagtcgaccactccgtcgatgctcgggtatttcggcagcaggttgcgttcgataattttaaccacgtagttcacaacgtctgccatgcagtgcacgctggtggtaatacccaacaggtttttggtgcccacgctgccgtcggcgttgcggtaaccttcaaaggtgtaatcttccagcggcggcagcggctccggcactttggtcgcccgaggcagggggttaagcggcggcgctttcggcagcgtgaccgtggatttgtcgatccagctgcctttggcgacatcgcgtaccgcgtaaccgataacttcgccatagcgaatgatttcaccattctgaggaaggttgttatcccttttctggcgtattcgtcattccattcgtatccccggtaccggatgtttatatcgtactgtgccggtgcttgcgtgctttcctgcaggtctgcaccgatttaacaaacaaaacttaacagagtctgaaggagtagtatttcgtgcaaataaccgaagcgttattttcagagcagggagacatccggcgttttgttcagcaggcggtggaccactggacgcatctgctggcagtccacttcacactccattcggcagaaggaaatatcaacgggcaacagattcatgcattctgtacttccttttatgaacgtattactgagcgtaatcacacgaccagtccatcatcgccgctggtattacgctggttgcgggaacaactacatggaggagcaacaatacgatgcctgttgctgctcagccagacgagcatttgccatccgcgagccagtgtgacaggtgatgaagcatgttcacaactggtggatttactgcaacagacctggcgggtgataagtgctggcggacaatgtcgggtggaaagttttttttcgggttgcccggcctgatacatcagagcaatacgttgctttaaaaactgctgttcagtctctgatgctatgggttattgcaacaatcatccggtgatggacgggagaaatatcgactcttccgttagtttttacaggctgataaagttttgccagctgaatctttatacggaatactctccagtatgcgtaagagaatttgctttttggaggggggcgacaaccagatggtaaacaaaagaatggttgaatgtggatgaggttcatattcattgattcagattttttgaagaatcaccacatgggatgtccatgtggttgtataactcagggccagcgcttaatgatgatggatgtattaatgccgccaaaggcaaagttgttactctgcaaaaactcacaatcaacctttcgggcttcatgcatgatgtaatccagcgcgccacagttcgggtctggtttattcaggtttagcgtaggcgcaaaccaaccttcgcgcatcatttgcagactcatccaggcttcgagcgcgccacaggcaccaagcgtatgaccaaaataacttttcagcgaggagaccggcacattatcaccgtaaatggttgctgtcgccagactttctgccatatcaccgcgatcggtcgccgtaccatgcgctgaaatatagccgatatcttgtgcacttaacccggcgattttcagcgattgctccatacaatactgcatggtttcgcgctgtggctgggtaatatgtgccgcgtcgcagttagtcgcaaagccgacgatttcaccgtaaatggtcgcgccgcgcgctttggcgtgctccagttcttcgaggatgagcgtacctgcgccttcaccaatcaccagcccgtcgcggttttcatcgaacggtgaaggtgtggttttcggcgcatcattgtgctggctggtggcaaaaagcgtatcaaataccgctgcttctgaagggcataactcttcggcaccaccggcaaccatcaccgtttgataaccatggcgaatggcttcccacgcgtagccgatagcctgactacctgacgtgcaggcgctggaggtcggaatcacccgcccgcgcagtccaaaaaacagcccggtgttaacggcagtagtgtgcggcatcatctgcacataggtggtgccagtgatgttgttcgtgtgcttttccgtcagcatggtggcgaactcgcttaccgggccggtactgccggtcgatgagccgtatgcaatgcccgtttcgccgctggttaatatcggatcgccaatcaaccctgcctgctctaacgccagctcgctggcacgggtcgacatttgcgacacgcggcccatcgcacggatacgcttgcgggtgtagtgctccggcagcgtgaaatcatcaacaggcgcgccaagcagggtgtgcaggccgtcgtaaacctgccactccggcattttgcgcaccgcattttcatacgccagtaagcgtgcagaaacgtcctgccagttttcaccaaaggcagtcacgccgcccattcctgtaatcactacgcgacgtgtcataacatccctccattgatggaaataacctggcgggtgacgtaacccgcaatatcagacattaaatagctggcaagcccggcaacttcttccgcctggcccatgcgtttcatggggatcatcgacattgcctctttcagagcgctctcttccatttcgatcatcccggtatcaataagccctggcgcgatgcaattgacggtgattttgcgcttcgcgagttcgatagccagtgcttttgttgcgccgataattccggctttggcagcgctgtagttcacctggccgcgattgcccattacgccggaaaccgaggacagcgtgatgatgcgcccaccctggcgtgcgccgatcatcggcataatgcacggctgaatgacgttgtagaaactgtcgaggttggtgtggatcaccgcatcccagtcgtcattgcttaaagccggaaaagcggcatcgcgggcgatcccggcgttactgaccacgccgtaccaggcaccatgttgcgcgatctcgtgctccagcacttcccgacactgttcgcggtttgcgacgtcgaaactgagcaaacgcccgttacccccgttggcgacaatggcgttcagcgtttcctgagcgcccgcggcgtcacggtgatagtgaacgccaatgttaaagccgtctgccgccagttggcaggcgatggcgcgaccaatgcctttgctggcaccggtaaccagaactgaacgactcatcaggacgctccttgttgaaacagggtggtaagttcttccgcggtcggctggaaggtgttaatgcggcccgtcgcctcgccgtcgttgatgctgcactcaaaactgccgaagcgatcgtcctgcatcagcagcttgacggtaatagtcagcgtctggcctgcgggcagaatgccagcggtgcaaagcaattcacgcgcgcccagtatcatccctaactcaatactgtttttgccctgctggtggcgatgccagccagaccagacgccgacggtttgcgccatcagttcaagggcaaaccagccagggagattgccgtccgggtcgagaaacggtgccagtacgccactgggcgaaaccgtcacgcggcacaccgcgctgtcatcgctgacgctcaccacgtcttccagcagtaacatgggcgcgtcgtggggcagataagcgccgggggataaatagtggctcacgaaaccctcccgagcagaatgctggcgttattgccgccaaaggcgaaggaattggacaggatcaccggacgtgccagcggctgcggtttttcgataatgccacacggtggcagcgtgggatcgcgcggcgacagactgaagtcctgagcgggcagcggtaaatcacgctgtaaaatcaacatactaattgctgcctcggtaatgcccgctgcgcccagcgtgtgtccggtcaaatgtttggtggagctgcacggtacgcgttcgccaaacagggcgttaaccaccattgattcaatctggtcgttgagctgtgtggcggtgccgtgcaggttgatatagccgacgtcatccggcgtaagctgcgcatcggtcagcgcctgattaatagcgcggatcgctccttcgccctgcggatgcggggctgaaatatggtaagcgtcgctcgattcaccaacgcccagcaacgcgatgggctgcggttcccgggtcagcagcattagccccgccccttcaccaatggtgatacctgcgcggtcacgaccaaacggctgacataaggttggcgacagcgattcgaggctgtgaaaaccgttaatcggcatccggctcagggtgtctgcgccacccacaatggcggcatcgaccagccccgcttcgataagcctgcgcccgctgattatcgctctggcgctggaagagcaggcggttgaaagggtataggccgggccgtcgagcgccagccagtggctgagaaaacgcgacggatcgccgagttcctgttgcgcgtagtgccatgtggtgctcggctgcccgtgggtgcgcaggttaacgtgcgtgtcgccttcatgcaggccggaggtgctggtgccaagtacaatcgcgatgcgctcgcgaccatatttcgctatagcgtcatcaacctgcggctggagctgcgccagcgccgccagcaggatctgattgttgcgcgagcggtgcgcagcgaatttttccgggataagcggaagctcgccatccacgccagccaggaccgcctgcggatgcccctgcaaccagcctgcgcgcgggcgcattccgggagcaacaccgcgagtcaggttggttgcgatttcgtcaaggttatttcccagggcgttgatcatgccgacggcggaaatataaatcatatcagtcacctaagtattgaatggtgatgtggtatttaaagacatgctgctcaatgctgattggcacgcgttttccctggcgattcagataggtgatttccgtgaccagtttgccgctggcgttacgcagctcgcgtttgtcgccgttgtcgcgaagcgtccagcctgtgggaagttgcggttgccaggcgctaatcggccagtggctgagcatcacgtcagccagtacctgacttgcgggcggtaactgtgggacgacgatggattgctcggcgcgtagcccttttgcatcgtaggtcaccagaaacaggcgaatgccgaccgacgacagcccggcaagggtgattttctgatcttcggcattaagcatcactagcagagactgggttttgccgttgaagctgccggtcaacagttgctgggaattgactgcgggtgaaatccccggcgcaggcagcgtgatgagcgtaccaggttgcagccacgcctgcgggcggccttcctgttccggttgcgagtggctacagccagtgaggataagcgtagcggtcagggcgagcgctcgccagaatgtggatttgatcatttttttgttctctttttatcgggcatcgccagcggcgaaagcaggaaggcggtgaaaataccgctcaccagcacaatgccaaaactgctgatggcctgggtggcgctgaataccagcattcccagcgtcagcaaggtggtgagcattgccagcgtgatcgccagtagggaagttaacggtgtaccgcgcggattactgaaaaacagcgtgtaattgatgccgatgccaagcaccagcaccagcgccagcagcgaaaagagattcaccgcctgcccgctaatcgccagcacagccagaccgcagcccagcgaaagcaccgaaggcaccaggctgataaaccctttgcgccagccgaggcgggccactgcgccgcaggcaattactgccagcgccaccagcaacaagccggttaacacataacggtaaagtgcgaacaattcatcaaaggtgtttttgcgatcaacccaggcaatgccacaagggtaatagctggagatttcctgtagcgccgcgctatttttaaccccttcaaccggcaccagcacgccgcttgcgccattttccagcgtcagccacagcagacgccagccttcactggcggggcttgccagccattcatcaaccttcaccggcatggcgttgagatccgggttcactgttgtcacgcccggcattttgcagtgcttttgttactgtcggggccgctgttgtcagcagatgtaaatcttcctcctgccgcgcaagggagttcagtggaatggtgcggtatttgctgataagcccgtcttttttcgccttctccagcgaggtggtaaatttctccagtcgccgtaatgtttgctgtggggagtcgccgtaaaccacgaaccatttttgatcgacgctctgcccggtcagggcggtaatggctttctcctgcgccagaatatgctgcggcagcgcctgtaactgcgagatatcgtcatcgacgcgtagcattgacatccccgccagcgaaaacagcgccagcgcgacggacagaccccgcgacagttttttattgcgccgccacgctgccagccagcgtagcatcagcgccatcgccggaaccggacgcaccggcaggccacggcacagccacggatgccagaacaggacggtcagacaggaggcgctcaacccgatggcggcaaaaatcgccatctggcggataccggggaagggggcgagcatcataatcagatatgccgccacggtggtgagcagcgccagcagcagggcattgcgtactttcgccaggctttgccacggcgaaacgtcgttgccgtgcaccatccgctcggtgagataatagagcgtgtagtcagcggaaatgccgataacgctcatgctcatcaccagcgtcatcaggtgtaattcaccgaaaatcaataaagtggcgaccgttcccgccagcgcgccgatgccgatggaaatcacgcaaagcaacaatgggcgcaaagagcggaacaccgccacaatcagtaatatcacccccagcagcgttgccacgcccagggttgagatatcctgcttcgcctgttgactggcgtaatcgctgtaaaataccgtgccgcgcgagagcaactgcgcctgtgggtaacgcgttttcagatccttttccagcgtattcagggtcgtgatgagctggtgggtttgctgcatatcaaacgacgatcccgccagttcaccgtgcagcagataccagtagttgccctggggatcctgcgtcaccagccagccgtccatcagccgcaaacgctggccgtttttcgccatcgccagctgcgagccgcgcattaacatcagcggatcgttttgcagctccttgccgcttaccccggagaatgcggaataaagctgggagaggatccactgcgcctgcgcttcgccgccgttttgcaggcgggcgcgggtgtcggggtcaatcaggccgttgcggtgctgccagaaaaacgctccccacgattgctggctggcggcatccattggtcctttaacgtcgccgagcgcagcggatttttgcagcagcgtcagccactcctgagcgaccctgggattagcctctttaccggggctgaccagccacaccagttggcggtccagacgctgcataaagccgtcattcagcgctgggggaatatcgcccatcacctgtttgggtaacatagccagcacgctactgttcagccgtgattgcggcagcaggatcagcaacgccgccgccatgaccaggcagactagcccccataacagcgcggggcgtttactgggcggcaaaacgttggtgttcgtcatcggtcagttgcgctggcgtcagttgatgttgggtaagagcaatatcggtgcgatcgccctgtttatcattaagttgaatgctctccagataggttttcccggcgagatcgatggtgttgaaaattttatccagcggcgtggtggtcggcgtcaggcgcagcgtccagcggccttcgcctttgtcagcaaattcgacgcggaagttttgttccagcactttgcgatcggcctggaacagcgcgcgcagcaggtggttaaactggaacatctgcgggttgttttctgccgtgatgatttgcggcggctgaccgttgatcacctgcaccatgcgtttatcatccagcaatagctgcatggggaacggtgaggtttgatcccacaataacccctggtcgcgggcgatcaacatctgaccctgagatcgcagcggctgcggcagatctttaatcgtccgggtttgatcaaaatgggcgcggatcaccggttgttcggtaaagcgttgctgaagatcgtccagggtcagggcgctcacaaacgggctaatcagcagcgccagcagcggtaaaaatttcatggtttgactcccatgcgttcaaacagaatatcggggctgacaaagcacagttcgcgactttgctcgtcgaccgcgacctgaatggtgtatccggtggtggcgcgtttgcccgtttcggcatcgaaaatctgatagccaatccgcagacggttttcgaactcttcgatatgcgcacgcacgcggatgcgttgctcaaaggtgagggcgtggcgatatttcacccgcgcatcgaccactggccacaaataaccggactctttcatctgccgatagccgtaattgaactggttgagcagcgcctcgcgggccacttcaaagtagcgaaaatagttaccgtgccaggccacgcccatcatatcgacgtcgtgaaagggaatggtcagctcgacttcagcggtaaatcggggatcgttaagcaccctttactccttgtcctgaatttccggcagttgccagaaatcgaaaaaattaaaccagtcgaggggcgactggagcgcgtaatgttccagacgcgcggcgtagtggtcgatagcgttttgcagcgcctgttggcgttcgccacgcggcaacagcagcgggtcggcaaaggtttcgcagtgaatatgcagcttgccgtgctggcgtagggcgaaaatcagattcaccgggcagcgcaaaatagacgcgagaataaacggcccctgtgggaaaggcgcaggctggcccataaacggactccagcagacgcgccagtcgccgccgcgttgcgggttgacggcgatgcggtcaccgacaatcgccacccattcgccgttatccagcttctctttcagcaggatggcggtttccgggccgatatctgttaccggcatcaggttaatgcctgcctgaggagccatctcctgcattatctgtttaaagcgttgggcgttttcgctaaacaccagcgcgttaatggttttgtagccctgaatttttgccagcgcccggcacacttccacatcgccaagatgcgaggccagcagcaatttgccgcgcggatcgcggacgtcaagcgccgcttctgcgcctggcgcaaacagcacatcacgccccagttgtagctcgccgcgccagctggcgattttgtcgagcatggcattaccgaaacgtagaaagtgctgatagctgttgatttttgctgcctgtggttgttgttggcgcacacgggcgagccagtcttgcgacgctttacgcgcacgagcagcggtgagccagtagacgcccaccaccgggtaaagcagcgcggtaaacgccgttcttcccagcagacgccagaccagcagcatcaggcgcattccccataaccctttaacttcactctgccgcgcccagtggctggaagagtggcacatcagcagtgaaggaatacgcggcaacatgccgaaaaacagacgcgtgtgcatgagcgagatgcggacgttatctttcagggcatcaaaatgcgaaagcccgtccagcggataggtgacgcgggtcggcacgaaatagctggtatttccctgccagtagaggcgcaccatcacttcggtgtcgaaatccatccgcttgccgatggtggcgcgttttgccagttgcagcgtcggcgcaaccggataaacgcgaaaaccgcacatgctgtctttcagttgcagggagagcgtttcgatccatacccagacgtgggtgatccagcgcccgtacagccgtgagcggggaatggagtcatcgtaaattggctgaccggagatcagcgccgcagggtgttgttcagcgagtgccagcagtttggggatatcttcaatcgcatgttgaccgtcagcatccacttgcaccgcatggctgaaccctgcgtctgccgctgcctgcaagccacgcatcaccgctgcgcctttacctgcgttttctgccaggcgaattaaggtcacgccaggctgttcgctaaccagattatccagttgctgttgcgtggcggcatcgctgccgtcatccaccacaatacagggcagattaaatggcttaagacgcgccagcacgcccggcatcatcgcgccgtggttgtagcaggggatcaacacgcagggagaaaagtttaccgacataggcggatcttcccgctactggcggtgtggcgggcgtcaccgtcgtgacgctgatagcagaaagtgagtacctgacttgtttcctgccatgttaattgcagggtaacagtcgtctcaggtataagtggcgccagaaatttaacattctggatactacgaaaacgccagcccggagcaagcagcgtggtagcataatgcattacccagtccaactgggccacgcctggtaacagaggctgtacggcaaaatgaccattaaaccagtagagcatcgggtcaaggtatagaacgatttccatctcctgcggttgaaccagatggcgctcaatttcatggcgtatcatgaaataactcctgtaattgcgcatagacacgcttattcatattgtttactggtatttcatcaataatgcgccagtaacgaggtactgcaacaggttcaagccatggtaatagtgctttgcgccaggacaactccagagttttccctccggagcattgccatatttgacgggcctctttatttggtacaaccacgacaccgatagcctggcgaccattgcgtattaatggtattgcagcgacatccataataccgtcaagtgccagaagtcgttgttcgatttcaaccagtgatatccgcttctcctctatttttaccactcgaccacgtcgtccgatcaggtggaactgaccgttttcattgaattgcaacatatcgtcaagcaccaatccttcagcagggattagtggcgaaaagacacgaaccccctcactttcctgtgaaagatgaacatcagaaaaagtaaaccaggggatattatcctgttgacggtaacgccatgcgagaatacctgtttcggtactaccatagatttcatcgggccatatattcagccaggtggaagttttctctacatcctgccatggtagcataccgccggcagagagaatcatttccactgggggaggcgtcagatgaaggtcgagtcgcttaaggaacgccgggctgctgacaaaggcatagcggtaggtatggcttaatgcggcaagttgctcagaataccagagcattgcggcatgcaatggcaggccaagtgccatgggtaaaaaaatacggaaagtcagcccatacaggtgctgaggcatcacggatgctacaaaacgacagcccagtagtcggtctgcaaagtgagttgccagcatgtttgcttcttgatcaaggctgataagaggttttgcaatttgttttggttgtccggttgaacccgatgtgaaaagttcaataaacgcgtcagaagcaatatcatcaaaggctatcgtgctggtcgtcatctggtgagatgtgcttacaacaaactgtggaccgttccagcccagccttttatcactcaggacgcaatcaaacaaggagcgttgtacatttaacaaagcggcgcgattatggcccgggattaccgggattttacctgagtgtagcgtggccaacaacgctacaataaaaagatagctgttttcaaaacaaagtgcccagcgattgcctggctggtcgcgtaaatggtcgatcaaaagcgctacatcatgccgcagatgccccagtgtccaggtatattccccaagccaggcaacaggagttgttacagggcgagaggctgtcaaccactgtgaaagagagagagtctgattcatggtgttttccgtttgatcatcttacgacgtatcagccattcccctgcagtcaggaaacctatcagaaggtaagcaatgataccgttccaggctgtccacaagggcatgttgccatacaaggtggtaaataacgcaatactgccattgaaaataaaaaacaggcaccagacctgcgttacgcggcgggtatatcgcacggccttttccgggaggtctggctcctgcaaacgtgccagccgctcaactatcggcattgtcgaccgcagcgaaccgccaaaaaccgccagcatgactgcgttaaccactaccgggtaaaacagcagtaactggtacgttttcaacagaaaactggagacacacaatacaatgcccacaacagcaacgatttttgtgacgacctggagcggccccgtctggcgacggggctggcgcaggcgcaataaaagcaacagcgccatcagcggcaacagccagtgcaggctgttatgcaccaaacctagccagattaaaaaaggccagacgagcagcaataatccggtcagcaacttaatcatcggtagcgagcgaatgcccgacatcaaattagccttcttgtagcaggcgttctacagcctcgacaacatcctggactgtacgcactgctttaaactcttccggcttgattttcttaccggttttcttttgcaggtgcacaatcatgtcaacggcgtcgatgctgtccagttccagatcttcgtacagtcgcgcttcaggtttgatgtcctgcggatcgatttcaaacagcttaaccagcagggctgagacttcctgataaatggtttgttggtctgtcatgatggttttcctcaggcacgttgcgcagcaatgaaagaggccagagtggcgacggagaaaaagtgctgacgcatttcttcgctttccgcagagagcacgatgccgtactcattttttactgccagtcccagttccagtgcatcgatagagtccagccctaaaccgtcgccaaacagtggcgcattgatatcaatatcatcaggagtcaagtcgtccagattgagggtgctgatgatgaggtttttaatttccagataaagcgcttgcattatttattcctgatagaggtaaacaaccttgctgtaattgaagcaaaagatgccggtttaactgtcttgcagccagcgtcggctcttgtgaagttgcatcgtaaaatttattgatttctacccgcccatggacttcaaccgtaaaaaacggcctggcaggcgggacgtcataccacttactttgtttatccagcagatgctcgctacagccgatcgtcacgatgcgtaaatcgctggtgcagcgcacggcaatattcgctgcaccgcgctgtaacgtcattttttcaccgggcttcgttcgtgtgccttcggggaaaatcaggatagtgtcaccctgtgccagtcgctgttggcagcggggtaacagggtttctgcttcgctgttgattaaataatctgccgctcgcacgacgccgccaagaaaaggattttttaacagcgcgcttttcaccaggcagtcagtttctggcatgactgatgccagcagcacgtaatcgatcagcgtgggatgattggctacgacgaggcaaccgcgttcctgacgtaaaatttcagcgccatcaatacgataatccagcacgccaagccctttcgcgacagttaaaaacaggcgaaaactggcggcaatgctgcgacgtgccaaacgacggcggcgggaagtatcccacactaaaactaacaatatgttaaaccacacgactgaaagcagcaggccgccgagaccaaacaggacaaaacataacccggtcatgaccagtcgccatgcccatcccaggcgcgacatcagcttactcatctgcggctccagcgccattgcacgcgctcgccaggcagtgaaaaagcatctgcattttgtaaatagtgctgtaaaaacaacatgctttgcggcagtgttgtttcatttaccgcaatggcttgctgcgtttcacattgccagtcatcgccagcttcaatcaccagcgcgacggcgtacggccaggtaggcatttctgcgggcagttgcgggtgataaaactcaggtagaaagccatcaaaatcgaccatcaacacgcgctggtatcccgcttgtagcaggctaagcacttcacacaaaccttgctggaaactgtcgcgaccagccgaaagcgatgacgaaacgatcggctgtttggccacaatggtcaggttacccacggaagagttgtgtacggaaagcgcgaagtccgtcggagaaagcgcctgttcggttgccagtgcatgaacaatgcggtaattgcgctccagttcgccatgacgactggtatacaaaacagcgtctggctgatggcggcgtagcattgtcagaccgcattcaacagccagtttgctgcctgaactgagacgacgagcggtcatcattggcagttcacttaattttgccaacggcgcggcagggtcaatcgcccacggctggcgcgaccatgcttgccattgctgcacatcgctaagtccaggcgccagtgcctgccagttggtaatatttaatgcaaatttcatcaacgcgcgcccgcggtaaaccaaaattattaagtgacgattatttcttttggcatatcaaaagtgtatgcccaacgcctaaattattgtgacgctctgctacctggaatcctgctttattcagatagtcgtaaaatttctctgcactatagaaacggctgttaccgtttgccatgcaggtaaaataaagtgaggatgcattcaggctaaacgatgtcgcttcaaaccgctgtgcatcccagaacaactccatgatgcaaagttttgcgccaggcttcattacgctggcaattttgctgagtatgctaattatttgttcgggtgaaaaacagtctaaaaattggctcatccaccagatatcagcctcgcctggtaatggtgcatcgcttagcatatccaccgcatggaaatctatgcgatcagaaaaacctgcattcgcgatattttctttcgccagtacgatttgttgtggcagatctaataacgtaacggcgatgttttcattgaatttgcagcagcgcaaagcccacttacccgtattgccacccacatcgtacaaggttgtggggttgttggcgaatacataaggcagtgcggcgttaaatgcgccatctgaatagtaatgatcaaacgcaaaccagctatcacgtgcggcgtctggtaattgcgaaagtgccggatatatcgtcggccagtcgccaaatacttttaacccggaaggttttccttcattgagtgaatcggcaaggaagaagagcccctggtaacagacatcctgggtgaaatccatattcacgcgagtcatagtgtcatgcaggaggtaatgaccgattttcgccaggtaataaattccctctttacaggtaataattcgcccgcttaagcccatatccagtaacacacccacggcatattcattcaggactgtgtgctcagtaatcgcattaaggggagctccctgtttaccctgttgatccaaataatctaatattcctgcattgcgcaggcacaaagctgcctggaaaagcataggagcaaaggcaatccgctgtgcttcggtgatggcatccagtgcgctgagcgtgtcctgttcgtacatatataaccattcttatagagaaagttaaatactatcgggccattccagcccgatatcagcatcactataacgttgctcctgtagataagttaacctgtatatctttatccaggttacgcacccagcggttatagtttttatgaatttttccatcagaagcctgcagattcaggctactgtcatatttgatgttatagtaggtagctgtatatgtaatacgaacctctgcaacgtgatttcgtgtttgatagcgagctttaataactccaggggacacttgcgtcataatccacttgcgctgcgcacctgctttcaaaatggcatttttaacctgctcctgagtatgacccacactgacagtggtgcttatctgttgcactggggccgtacggacacaggcactcaacatactgataaaaattgtgatggcaaaccattttatataacgtttcattagtgcctcttatgtatgcaatacaattatataattaaatagtaataacagacagtatatctgtataaatcccagacttcttacccgaaatatatttggggttatattggattgtcaatgtctggttgtgacagggaccaaagatatgccggtatcatttttgtaaatggcttgtgaggtggagagccctctgcggtaagctccctcgacattccttttttatttatccgcacatattcttattctgatattgataaaacacggggtatggattgagactgaacagcttgttgtgcccggttttaatggtaaatgcatatgtgtcccagaattgatattgacttcctggtactcaatattctgaaaagctgaagaaagatcacgtttttgacatttttttgatgtcttgtcataaaactgtttcatgacagactttttcaggtgtaaattttctcgctgacactttttgacatgaatttacactggcatcacacaggccagaatacggggagaacatgcagcgccggcagaacaacattctgacgaaaacgtcccttttatcccgtgcgttgtctgtcccctgttgtgatatgttccggcgcggctctccgtggatatgctatctctccctctccgttttttctggtttttttatccccgcattttcgtctccggcagccatgctgtctccgggtggccggtaccctgctgaacagtgcgctgatttatgcggggaataacctgaagctgtttacagaccgtctgcataaccagcatggtgatatcctggccgacaacagtctgtgggtacagaaggacagcagcgggacggcaaacagcgaaatcattaaccgttccggtaatattgaaaccatgcgtggcgatatcaccatgaatacggcgcatctgctgaattcatgggatgccatttcggccagccatgaggtcattccgggcagcagccgcggggtgatttcaccggttccggaaaataaccggtggtggggtgttgtccggcatgatggtgtggaatatctggccgtgtactggggtaagggtgccacggtacctgatgaataccgtatccgtacgggagatacggatacggtgacagtcagtgccaccggccatgctgccaggatatccggcggcgctgatatgcatatccgtgcaggacgactggataatgaggcatcgtttattctcgccggtggcagtatgaccctgagtggcgacacactgaacaatcagggctggcaggaggggaccaccggaaaggaaacggtctggcggcttgcctccgactcactccccaaagcgtggtttactgagccatggtacagggtctatcgccaggtctcgccggatgcgacagaagccagtggcacctctccggtaggtcagtaccgtgcggttatcagcgctgccggtgatgtgtctgccagctttgccactgacaccggtaataccactgtcatgccccgggcaggtggttcaggtaacacgataacggtgccttcgctgaactccctgacaccaccgacggtcagtcagggggtgagcggtgaagccctgctgaatgaaagcggtaccgggataaccggccctgtatggaatgacgcgctgccggatacgctgaaggatatcccgggtgcgctgtcgctgtacggggcaagtgtaagcagctatcccctgccatccggtaacaatggttattttgtcccgtccacggacccggacagtccgtatctgattacggtgaacccgaaactggatggtctcggaaaggtggacagcagtctgtttgccggactttatgacctgctcaggatgcaacccggagaggcaccacgtgaaacagacccggtgtatatcgatgaaaaacagtttctgggctcatcgtacattcttgaccgtcttggcctgaaaccggaaaaagattaccgctttctgggggatgcggcttttgatacccggtatgtcagtaacgtcatactgaaccagacgggctcacgttatatcaacggcacaggctctgacctgacgcagatgaaatacctgatggacagcgcggcagcacaacagaaagcgctcggactgacctttggtgtgtcgctgaccgccgggcaggttgcacaactgaccagaagcatactgtggtgggagtccgtcaccatcaacggacagacagtcatggttccgaaactgtatctgtctccggaagatatcacccttcataatggcagcgttatcagcgggaacaacgtgcagcttgcgggtggcaatattaccaacagcggcggcagcatcaacgcacagaatgacctcctgctcgacagcacaggtagtatcgacaacctgaatgccggactgataaacgccggtggtgcactgaacctgaaggccatcggggatatcagcaatatcagctcagtcatcagcggtaaaaccgtatccctggaaagcgccaccggaaacatcagtaacctaacccggacagaacagtgggcgatgaacaacggatataaccatttcagcggaacggataccggtccgctggctgctgtcagggcaacggactcactgtttatgggcgcagccggggatatcagtatcaccggtgccgccgtttctgccggtgacagcgtgttactgtccgccggtaatgacctgaacatgaacgcgatacaggccggagaacgtcgtcgctatggcgggtccgggtggtatgaaactcatgccgtggcccccacggtcactgccgggaacagtctgatgctttccgccggtcgtgatgtgaacagccaggctgccggtattacggctgaaaacagtatggatatccgcgccggacgggatgtgaacatggctgcggagtccacaggcgcaggtgaccacgacagcactttcagcatgaagacggttcatgattcggtccggcagcagggaacagacatgaccagtggcggtgacatcacggttactgccggacgggatatcacctcagttgcgactgctgtaacggcaaagggcgatatccgtgtgaatgccggtcatgacatcgtactgggtactgccacggaaagtgattatcactacagtgaatcaggggaaacccgcaaccgtctcctcagccatcagaccacccggaccatcacggaagacagcgtcacccgtgagaagggctctctgctgtcggggaatcgcgtgaccgttaacgccggcgataacctgacggtagagggttcggatgtggtggctgagccgggatgtgtcactggcggcgggtaatcatgttgatgttcttgctgccaccagtacagatacgtcctggcgctttaaggaaacgaagaaatccggtctgacgggtaccggcggtattggtttcaccattggcagcagtaagacatcgcacgaccgccgcgaagccgggacaacgcagagtcagagtgccagtaccatcggctccactgccggtaatgtcagtattaccgcgggcaaacaggctcatatcagcggttcggatgtgattgcgaaccgggatatcagcattaccggtgacagtgtggtggttgacccggggcatgaccgtcgtactgtggacgaaaaatttgagcagaagaaaagcgggctgacggttgccctttccggcacggtgggcagtgccatcaataatgcggttaccagtgcacaggagacgaaggagagcagtgacagccgtctgaaagccctgcaggccacaaagacagcgcttgtctggtgtgcaggccggacaggctgcgacaatggcctccgcaaccggtgacccgaatgcgacgggagtcagcctgtcgctcaccacccagaaatcgaaatcacaacaacattctgaaagtgacacagtatccggcagtacgctgaatgccgggaataatctgtctgttgtcgcaaccggcaaaaacaggggcgataaccgcggagatattgtgattgcaggaagccagcttaaggccggtggtaacacaagcctggatgccgcgaatgatattctgttgagtggcgccgcaaacacacaaaaaacaacgggcaggaacagcagcagtggcggtggcgtgggtgtcagtatcggtgcaggtaaaggtgccggtatcagcgcctttgccagcgttaatgcggcaaaaggcagggagaaaggtaacggtactgagtggactgaaaccacaacagacagcggtaaaaccgtcaccatcaacagtggtcgggatacggtactgaacggtgctcaggtcaacggcaacaggattatcgccgatgtgggccacgacctgctgataagcagccagcaggacaccagtaagtacgacagtaaacagaccagcgtggctgccggcggcagttttacctttggctccatgaccggctcaggttacatcgcttcctcccgggataagatgaagagccgctttgactccgttgctgaacaaaccggaatgtttgcccggtgatggtggcttcgacatcacagtgggtaaacatacccaactggatggtgcggtgattgcctncacttgccacaccggataaaaaccacctggatccggacstggggttcagtgaccttcacaacgaagcggattataaagtcagtcacagtggaatcagtctgagcggtggtggcagcttcggggataaatttcagggtaacatgccgggtggcatgatatccgccggaggtcacagcggacatgcggaaggaacgactcaggccgcagtggcagatggcacaatcaccatccgggacagggacaatcagaagcagaatctggcgaacctgagccgtgaccctgcgcacgctaatgacagtatcagcccgatatttgacaaggagaaggagcagaggcgtctgcagacagtggggcttatcagtgacataggcagtcaggtggcggatattgcgcgtacacagggagaactgaatgcgttgaaggccgcgaaggaagcaaccagcgaaacacttcctgctaatgcaacagagaaacaacgccaggaatatcttgcgaaactgcgtgacacgcaggcttacaggaatgaaatggcgaagtatggtaccggcagtgaaattcagcggggtatccaggccgcgacagcggcgcttcaggggctggcggggggtaatttagcaggtgctctggccggagcttcagcaccggaactggcacatctgctgaaatcaacagaaaaagacccggcagtaaacgccattgctcacgccattctgggcggcgcagtggcggcaatgcagggtaataatgccgctgccggtgcagcaggcgcagcaacgggagagctggcagccagagcgattgccggaatgctgtatcctggcgtgaagcagtcagacctcagtgaagagcagaagcagacgataagtacgctggcaaccgtgtcagcagggctggccggcggtctaaccggaaacagcaccgcatcagcagcagtgggagcacagagcgggaagaatgctgttgagaataactcactcagtgctggctggaacaatatcctgccatcaggaacacaggattacggacaggccgtagcctcgtggaatcagtatgctcaggacaataatctgacaccggagcaggttcaagaagggatgaatcgtatagctattggtgaagggccttcttgggggacaacatataaagtacacccggtagttcaggctggcggtgatgttagctttatccggggttatactttaagcggaactatagatgacaatcatatttcagttaatcaaggggatatttatagtataggtgctcatggcggagcctcgatcggattatcctttggcccgtatttcccgggattaataaattcaaatgataacgattattcgataaatggtggttttggcgttggtgcagtggggctttctacgggtaaagatggtgttagtttcacttttggttttggcccaagttggggttggagtgcaactgaaattaaaggcgttgacgttaatggcacttcaacaagtgaggtttatcgatatgattttaaataatttctatagtttactatttttattgatgcttgcgctgtcaatattttccttcacagtgctatttgctttgtttatatataaagatctcggtggtgtaaaatttgcccgggactcttttttgttttttgattatatattttttagttctgacatgagagcaaatgcctctgcactatcggttatctgtgtttttatatttggattggcttttgatcataatcgtaatccacttgttaagaattacttggtcgatatagtatggtttttaggtgttgttttattttttatacactgtcgttttttttctaatctggaatatggtaagacaaaaattatttttgtaagagagctttttttcaacctaaaaataaaactaaggttaatatttttatggttgtcacgattattattcatcatattgatattaaatcgtttttatcgttgatttgttgttgagaataatttacttggcggtagtgaatatgctcattctgcgtggatacgccagcatggtatcgacatggcgacatgtacagaaaactcttccggtgccgcctgccagaaagcaatgaatgagagggatgctgtagggctggctctggcaacaggtactgtggcactactccccggtagtgctcaggctatgtggggacttggagcaagtgcgaatgctggtatcagttatctggctgatggtactgtagatccggcaaacgcagccattgcaggctgggtgaatgtgttcagcatgggtaatggcctggcggggactgtgggctggaatgctgcaggtggtgcgctgggtaactggatcggcaacaaagatcctctgtctggtgcaatttcaaatggtatcggttctgctgccgggtatggtatcggtaaaggtattacttaggggacagataagattacgaatgctgtaggaaaatgggtgacaaatggctgggatcctaagtacgatccaacatggataaaatatgctgaagtaaatcgtaacgatatcattcgagaaggcatgaaaccgagcaatattcctggaactgctggagatattggcggttctataggatccgagctaggtggaaaagtaacagataaagtatctgaggaactcaagaaatgaaatattcttttcgagtggtaataggtaagtttattatatgcagttcaattctcttattgtgttttattggcatgatcttagcggccataataactaaactaacgtttgtagcgttagcatggtttcaaagcgggatttttgaagttttgtagagcgatattgtttatgctgctcagttgggtggtctggggggggggcatattaggtttttgttgggttttgttatatctttttagggcaaagggctttagttgagaataactacctgagcgtgtctgaaaagacagaacttgagatagcaaaacagacgcttaaaaacagtaaagatccggcagaacgtgaaaaggtacagcagaaatatgatgcattgcttgaaaaagatattgccagtgataaggaggttattgctgcctgcagtaatggtaatgcgggtagttcagcgtgtgctagcgcaaggctgaaagttattgcgtcgaaagaagggtacgaagatggcccttataa

SEQ ID NO: 149 - DNA, 72 bp, Escherichia coli
catacgcgtcgccagtaaccaaaatgatgtcgcagctatccagccaagttgatccatctcttcacgtgacat

SEQ ID NO: 150 - DNA, 7733 bp, Escherichia coli
cggaaatgaagtgatgttgatgaacggtggcgaaataccctggtgaggtttttcactgcccgacttgggcaagcacatttaaggctggcggtatcgtggcaactgccgctactatttatgccgatcagcaacgttcaaatcatattgcacgacgatcggctatccgaggacacccacagtaaggcaaggtatggaacaggttattacaaagcgccgctattacgatattggtctacagattgaagagctgctgtattcaggcgtatttaaggccggagaacgcttaccttcagaacgtgaactgagcgagcggtttaataccagccgaactaccattcgtgaagccatcattatgctggaactgaaaggcgtattgaatgtgaagcaagggtcagggattttctttgtcgactccaccgataagctcaaccagaaatcattaatgccctattcagaaattggcccgtttgaactgttacaggcacgtcaggtaattgagagcaatattaccggttttgctgccagccagatcagctttaacgagttacaagagttgaagaaaatcattggattacaggaaaaagccatcgctgcggaaagtgataaatttgaagacctggatcaccgatttcatagcattattgccgaagcgacgcaaaatcgggtactcatcaaacaagctgctgaattatggcgggcagttcgtacagaaaacccccgctggaagaaacttaactacaagtacctgcatgaaaagcatttgcgtctgcaatggctggaagatcaccgggctattttcctggctctgcaacagaaagattcagagctcgccagggaagcgtcctggagacatctggaaaacagcaaaaatgaactgatcaaaatcttcaaacaagacgcttccatcagcgattttgatgactttttcttcgctcgttaaccttcattagtccagagctggcggaaaaaataacgccggctctgccttccgccctccactggtacacgctctctttttaattggtctaataaatcgactatcatcagatatcttagattagcggcaattatcctaaaaactgacctctaaaaaactttcctttcattttattcatataactcattgatacagatataaataacgccttgttgttctgtttcgtacttttacctttctctgcaagcgtgatgcatctctctgtttttggtctaatgaattatgtaaattggtatacacacaagccaccaggagtaagagcataatgtcagggaacgaaagtatcgatgccgcccactatgatcaggtaaccacctggcctcggggcgggttacaggcagatattgtccatattggttttggcgcttttcatcgcggacaccaggctgtctacacggatctcactaatcaactttcggacacccgctgggggatctttgagattaacctgtttggtgatgctcaactgatcgaaaacttaaatgcgcaaaatgggctgttttcggttgtggaaacatctgcatcgcaatctacctcacgccttgtgcgttcggtggctggcggtattcatacccccagagatggcattgccgcagcaatccataaactggctgaacctcaggtaaaaatcgtttcattaaccatcaccgagaaaggttattgcctcgatccgcaaacacgttcacttgatctcaccaatggattaatccaacacgatctacaaaacccggatgcgcctctgtcagctattggcgtgatcgtctgtgctttgcaacaacgtaaagcgacaggactcgccgcttttagtgtgctctcctgtgacaacttgccagacaatgggcatctgacgcgcaatgccgttctcggttttgcccgacaactggaccagcccctggctcagtggatcgaagaaaatgtctcatttccaggcacgatggtcgatcgcattgttccggcaatgactgaatcgcaattcgccttactggaaactaaaaccggttatgccgatccctgcgggatcgtctgcgaatcatttcgtcagtgggtgatcgaagataattttgtgcgcggacgaccggaatgggataaagccagcgcgatgtttgtcagcaatgttcagccttatgaagagatgaagttacgcatgttaaatggtagccattcatttctggcttataacggctcactggctggctatgagtttatctggcaatgcatggaagacgctaattttcgttccattacccgccaactgatgattaatgaacaagcccgaacacttaatccagacttaaatatcaacatccaggaatacgccgacctgttaattgaacgctttagcaaccgtaatgttgcacaccgtaccgggcaaatcgctatggacggttcgcaaaagcttccccagcgagcgctgacgccctggctgaaattgcatcagcaaaaacaaaacaatgctgttctgtcactgctcgttgctggttggttgcattatgtcattgatgctgttgagaaaagccagtctgtcgctgatccaatgaatgaccaacttcaggcgctaataaaggaacaacaagacgcatggcaacaggcgctcgcattactgcaccttagcgccatatttggtgatttaagcaaccatcagccatttataaatgaaataaaaatcgcctttgcaaatataaaaaacaaaggcatcaaggccaccatcagccaattattatcggatgagcagaaatgaaaacattaatttgtcagcagcctggcgttatggaatatgtggaaaaggatattcccacaccagcagataatgaagtgctgttaaaaatcaaagctgtgggtatttgtggtactgatattcacgcttttgccggcagacagcctttttttagctacccacgtgtattaggtcatgaaatatgcgccgaagcggtttcgcgaggcagccagtgccaaacagcacagctaggccagcgctattccgtcatcccatgcattccgtgtggcgagtgcgcagcctgtcgggaagagaaaacgaactgctgcgaacgtgtttcgctgtatggcgtgcatcaggatgggggttttagtgagtaccttgcggtacgtgaagacaaccttgtgcctctccctgacgaggtcagcgacagtgccggagcattggttgaatgtttcgccattggtgcacatgccgttcgtcgggcagagatcaaggctgaacaaaacgtactggtgattggcgctgggccaatcggtctggctaccgcagccatcgccagggctaaaggggcacatgttgttgttgctgatattgactgtcaacgtcgccagcacgttgtggatcatctggcgattaatgccttcaatcccacacaggaagattttattgccgcgcttcgtgaggcctttggaggcgaactggcttgcgtagtactggatgcgacgggaaataaagcttcaatgagtcatgatgtaaatcttattcgtcatggcggcaaaattgttttcatcggtttgtacattggtgaacttgttattgacgatccgaccttccataaaaaagagacaacgttactcagcagccgcaatgccacacgggaagattttgcgttggtgattaaactgatgcgcagcaataaaattcacgaaaatttaatgaaaaaccaggcgttcgatttctttagtgttggcgaagattaccagcgtaacgttgtagaaaataaaaatatggtcaaaggtgtgatcactttttaagggaacaaatatgacaactgtttatgtcagtgaagaaaatttaaaatcactggtgcaccacaaattacataccgccgggctggataccgacaccacacaacaggtgacagatgttttagtacatgccgatattaccggtgtgcattcacatggtgttatgcgtgtcgaacattattgcacccgccttgctgccggagggttaaataaagccccgcagtttagcattgagcaaatttcaccgtcagtggccattctcgactctgacgacggaatggggcattccgcattaattagcgccactgagcacgctattaaactggcccagcaagagggtctcggttttgttagcgttaaaaacacgtctcactgtggtgcgttatcttattttgcagagatgatcaccaacaaagggttggttgctatcgtaatgacgcaaaccgatacctgcgtggctccccatggcggcgccgagcgctttttgggaactaaccccatcgcctttggtttcccggtggaaaacagccatccgatgattgttgatatggcgaccagtgccacggctttcggcaaaatacttcatgcaaaggaaaccggaaaacatattggtgaagggctggcgatagataaaaacggttatggcaccactgatccgtataagattgaaaacctgctacctttcggccaacacaaaggttcaggcattgcactggctattgatgcactgactggcgtgctgatgaatgcgaattttggcaaccatattgttcgcatgtatggtgattatgacaagatgcgtaagctggcaagtttggttattgccatcgatccgaaaaagctcggcaatcctgtttttgcaaaaactatggcgaaaatggtcacggagctgcatgccgttaaaccggctcctggtgtcgaaaaagtgttagcgccgaacgatccgcaaatgcactacaaagaaaaatgccaacaggaaggtattccggttccggcaggaatattccattatctggcagagaattaatcactattttttattataacgatagaaaagcgctgtatttatcgtttctgttatattaaccaggagcaggatatgaaagcacttcgtcctctgacggcatcgcttatgctgttaaccagttgtttattaatatctaataccacactggcaaaaacaacattaaaactgagtcataatcaggataaaagccatgctgtccataaagcattaagctatttagcggataaaaccaaagagtattctaatggtgaattagttattcgcatttacccaaatgcgacattaggtaatgagcgtgaatcactggaattaatgaactccggtgcattacagatggttaaggttaatgccgcatcactagaatcatttgctccggattacagccttttcagtctgccgttcttattccgcgaccgtgatcactattatcgtgttctgcaaagtgatttaggtaaaaaaatacttaattcatcagaaagcaaaggttttgttggtattacgtactatgacggtggtgcgagaagtttttattccaataaaccgattacaaaacctgaagatttagcgggaatgaaaatcagggttcaacaaagccccagcgccattgcaatgatgaaagcactcggtggtgtcgctaccccgatggcgcaaggcgaactctacaccgcacttcagcaaggagtggttgatggcggagagaacaataccgttgtctatgccgatatgcgtcacgccgaagtcgcaaaagtctattcacgtgatgaacacaccatggtacccgatgtgttaattatcagcaccgacgtgttgaataaacttggtgataaagagcgcacggcattattaaaagcagccgatgagtcaatgatgcagatgaaggacgtcatttggcctgcggctgaaaaagaagcctacgacaaaatgaaagggatgaacgcaacagttgttgatgttgataaatccgctttcaaagaacgcgtcaaaccgttatacgatgaattcaaggcgaaagatgcacaatcagccaaaaaccttgagctagtagaaagtatgtaaccctaatgggcaggtaattcctgccttttcatggaagacttatgcgaacactcactcatattcttaataagatccttgccggatgttgctgcattattctcgccattatggtgttctgcgtaacctggcaagttattgcacgttttatttttaacgctcccagcactgtgcttgatgagttcacccagattttatttatgtggatgattttgcttggcggtgtatatactgcgggtttaaaaaaacatctggccattgatttgttggctcaaaaacttccggctgcatctgttctgacgcttgacagttttatccaaattattattacggtctttgcggttattttcatgatctatggcgggaatattgttgttgaaaaagcacaacatgttggacaaatctctccagtattaaaatggccaatggataaagtatattgggttatgcctgtcagtgggcttattctggtctggtattcagtaatgaatattattgacaactatcgtaaacggaattttcattaacgagggaaatatggactttgaatatatctaccccgtcttaattttatttggcagttttgccgtcatgctggcaataggtgtgccaattacttttgcgattggtctttcttcgctgttatctattattactgccttaccacccgatgccgccatttctgtgatttcgcaaaagatgactgtggggctggatggctttacgctattagccattcccttcttcgtgttagccggaaacattatgaataccggtggtatagccagacgactggttaacctggcgcaagcattagttgggcgtcttcctggctcactggctcattgtaatatcctcgcgaatacactgtttggtgcgatttcaggttcagccgttgcgtcagccgcagcggtaggtgggattatgtcaccactgcaagaaaaagagggatatgatccggcgttttcagcagcggttaatattgcctctgcccccattggcctgatgatcccaccgagcaatgtgttgattgtttattccctcgccagtggcgggacttctgtcgctgcgttgttcttagctggatatctgccgggcatcctcaccgctgttgccttaatgtttgtagctgcactttatgcccgacgtcaccattatccggtggccgagcgcattaattaccgtcagtttttacaggtattccgcgaatcaattcctagcctgatgcttatttttatcattattggcggtattatcgcgggggtatttacgcctacagaagcatcggcaattgcggtaatttatagtttagccctggcgatgatttaccgggaaatcactcttaagaagctcaatgatattctgttagactccgtagtaaccagttcaattgttctgttactggtaggctgctcgatggggatgtcatgggccatgacgaatgctgatgttcctgagttgatcaacgaactgattacccgcgtttcggataacaaatgggtcattctttttattatcaatatcattctgttgatcgtcggtacctttatggatatcacgccggcgatcctgatatttacacctattttcctgccgatcgcccagcatctggggattgatccgattcacttcggcatcattatggttttcaacttaaccattggcctttgcacaccacctgtcggcaccattctgtttgtggggtgcagcattggtaaggtcagtatcgacagggcaataaaaccattactgccgatgtttctggcattgtttgtagtaatggcaattatttgttatttcccgcagcttagtctgatgctgccaggattattttcgacctgatacacaatgaagactgcatactgagtaattttcaatgccccaccactctgtggggcattgaattggtcc

SEQ ID NO: 151 - DNA, 1261 bp, Escherichia coli
tcattaatcaattttttgatatgttctctaatctctaacaacctcataccataagagatgaatttataatcatctgtatcacgcgcaggcaaattattaattaaacaaataaaaaaacccaaatctcgttcaacaccacgattatatctaataccagccataatatactgctcattcgtcatatacagtgttgccgaagagggataatcaaaaagaacaagatctcttaaataagtagcagcaatttgaaaggtaaaatcatcctccattaggcatgtcgctaactctaactgatttctggtagttaattctgaagggtctagacctagagtaatcgctgcggttcgtatttgtatacccattgagccaaatgatgttttattttcaggcatatctaacaatccgatcattctttttgtttcatatatctgaaacttataattttcaggcatacctcctgactcaatccaggccacgccgcccagtaactctggacgaattccagcggcgtatgcatgtttaattattttgtctctattatattgtacatatgcatctttataagcatttaaataatatactcctgaacggcgacgcgaatcattttttcctaacttccagagtaaaacgtccatttcatcccatttacggaacttcgcttgtggaattgtacaatatctattttttatagtgagatcgcttttcatatttaaaaaatcctttcttcccaacaactatatgattccgtactcgcgatatggtgcttccatgttatatttttataattaagaacaatgacatcttccggctgattacccgcatgtgtaattgagtgtggataacatgtcagaatattcgataaatgtgctccttgcaattcaattgtgtaaaacctttcaatacaaccgccagaattaattctataaaaattaaatacagctgataactcttcattttcagaaagagcggcatttaataaaggggaggatttatctattggcttgtaaaattttatggggtgatgcactacattatactctcgacttaaagaatggtcgaactgtaaaacaaaaatttcatccacatgatttatttgatatttattaccaatagatgcatacgaaccacaaccctcagagatcaaaccttgtattttccctttaattgataagtatatcatatttgacatatatattctccataatcattttttccgaaaaactcctgtatcatttgcataatacatctctcctgtgggagc

SEQ ID NO: 152 - DNA, 7306 bp, Escherichia coli
gacatttctaaaaagaggccggtgctgctaccggtctcagcccagattagccattctttcttcccgttttcagtcctcgatggaaatcgttaattcgcttaatggttttaaccgcacgctgcggcactgcggaagctaccgaccagacaatcatttccagacacaacaataccgtaccatgtagcggcgttttccctttttcatccccgcgcggaacatgaatcacgatactggcgtctttgctaaaacgtgaatccagcgcgtttgtcagcaaaataacagggatccccagccgcctcgcctcacgaagcgttgtcagcccttcccggtgcgcagatttttgcgccatcatgatcagaacatcgccacgttgaagcgcgatcagttgctcggcaaggccaatacccgtacggtttagtgccgtggcaggcaaacctatgcggttgaatagtcgtgcggtatagtccgccagaatacccgaagcgccaataccaaaaatagcgacttgccgtgcctgcaccaacaacgctacagcttgcgcaagcgcgtggcggttttcaggctctgacaggacattacaggtatacaaatgcccttcaagaacaaagtcgattgcggtgttaacatcgctcgtcaagttactcaccgtcgtagacatcttttcgctggaactaagggctggaccaagccactgttccagagtgcgtttcagatcacgcagcccggcaaaccccagggcctgtatagccctgataactgtggcatcggaagtgttcaacgtggccgcaatttccatcgccgtttgctcgagtaccacttcacgatgctcattaatgtagctggcgacaactcttaacccaggcgttaactgactcgcgcgagtgcgaaaacgctcaccaaaaatatcaacccgcactttatctttctggatcatttatcttccggtagaggtcgccctgcaatttgtgattgtatctgcgcagccatcagccccagagatgcaaaggagttagaaattgcctcttcacgagaaatcagcacataacgcccggaacgacaggcagtcagaaactgacaccatcccggcatgactttttccattgctgccagctcatcctgaggtttaccaccggtgtcaccgcgccaggttgcaaaaacaaaatcggcatccagttcaggtaaacgctccgcgctcacatccattcgcccaccttcaggaatgctctcaatcagcggcggaaaacgaaaaccagcatcgcgtaatacccgtcccagcgaatgatagctatgcatcacattaatttttccctggtttgcctgaatcaccgataccgttattttttggctgtccagcgtcgccttcagcgcattgatttgtgcctgatagcggcgttcaagtatcgccagctgcgactgcgttcctgtaagttctgccagcttgcgatagatttctggcgcgccccctttgagatgatcaatgctcaccgtgggcgcaattttttcaagttgttcaatgggcgtattacgggtcggttctgtgatgatcaggtcaggctttgccgccacaatcgcttcaatatcaatatcagcggtaccaataaaggcgatcgatgaattatcaaagtcgacacctgtcaataacgcgccagatcgaatgaaatggctaccgtcaggccgagttcgcccgtggctggcgacaggaggtacaccgagctcaatcagaggaatagtgatatcaagatcgtgtaaagagacaattctctttggatgagcaggaacagtgactttgcgccctaaatcatcagtaaatacctgaacaggttctgttgcacgggaaaaaaatgacaacagtatcagcagagaaaaaaataaacgcatataactcccgttaaaaactgttcctgcgctgccagagcagtagcaaaaaaaatggtccaccaatcagtgagataatgattccggcaggcagttgcaaaggcaaaaaagccaaacgaccaatgctatccgccagaataactaacaacgcccccgataccgcgctccccagcagtaatgtcgtctgcccgccacgtagaataaaacgtgatatatggggtgctatcaatccgacaaaaccgatgttaccaacacacgaaacgcagacggctgtcaggattatgggtgcggcgacacgtaacaacgccagacgagaactattcacccctaacccggttgcaacctgatgaccaagcagagcgatatccgcagtcctggcggtgaacagcaataaaagagcggctggcaacatccaacaggctgaaataccgactaacatccagttagctgcatgcaggcttcccgataaccacatcaatgcagtttgtacatctcgaacatctgcagtggtcataaatacaccgataccggcggcgaaaaaccaggaaacaccaataccaatcagaacaaatcgcgggcgggaaatatcgcgcgcacaaaaaatcacgattaaagccaccaacaggccaccagcaagaccagccactggacgccagaacattcccagcattggaaactggaaaatcagccacagcacagccacgctacatccttctttgacgccgattaaaccaggatcggcaaggccattacgtgcaatggattgcattgcggcccccgccatacctaacatggccccgcatagcaatgccatgatgactctcggcaagcgaatatcctgcacaatataacgtgcgtctgtgcttacgttttctggagcaaacaacgctcgtcctacttccgatgccggaacaaagaaagaaccctgcatcagaccgaatatcagtattccaaccgcaaacagaaacaacccaccaagcaacaccagatttttagggcgtaccagtgtcgaaaacttaccaacacgtagtggtcgtagcccgacgttcattatccgactcatttgaacatcctcgtcgccataatgacaaaaacgggcgcaccaactaacgccgtcatgacaccggtcgctaactcatggggcgtgaaaagcgtccgggcaataatatctgccagtaataacaaaagtgcgccgacacaagctgaaagagggagcagaacgcgcagatccgctgataccagacgccggacaatctgcggtactagcaggccgacaaaaccaatggggccagcaatcgatacggctgcgccacagagcaacgcgatcgcaagcagggtaaatgttcgcgtgcggagtacagagacgcccagcccctgcgccatgcgatcgcccagtgccaacatgttaagggagggtgcaaggtaaagggctaacacaaatccccccagagaaaaccaggcggacgtacccagcgtcgcccaatcctgccccgctaaatcacctgctagccatgtccgcatcgccagcagtgtttgttcgtcaagaatcaggattgcagccgttattgaggacacgaacgccgatagcgccacgccgcataaagtaactttcattggcgttacccctgaacgccctgcggaggaaagcagcaatatcaacaggaacaataacgcgccccccgtagatgccagcagtgggcgtccaaccggaaaggccagtccaagcgcactggcggcaacgacagcaagagcggctccggcatttaagcctaaaatatgtggctcccccaatgggttacgaatgacagcctgcaacaaagcaccagcaacaccaagagaagcaccggtaagcaatgctgccgctaaacgcggcaaacggagtcttacaattacgttgtgatcgaagttttgcggatcaaaatgaagaaatgcctgcaacaccgtttgtggtgcaataaatcgggcaccaatccctggatataccacgcatcccaccagcagtaaggcgaggaaaattacagtaaccagccctgtgcgcatcatactttttctacaccacgaaacggcatgaagaacggctttcccgtcagaggatttattgatgcgtgaacatcaacgtcaaagaccgcttttaccagttcaggcgtgcaatgctccccctcattcaacacacgcaccactttcccctggcgtaaaaatatcaacgtatcgccataattgacggcaaaattcagatcatgcaacaccacgacgactgtacgcccgtgatgacgcgttaaatcatgtaataactcaagaatttcaacctgataacgtaaatcaagccaggttgtgggttcatccagcaggatataaggcgtcttttgcgccaacaccatcgcaatccagcaacgctggcgctgcccaccagagagtttttcaacaggtaaatgtgcaaactcctgcgtaccggttaatttcagggcatcttccaccgcctgctcatcggcgtcgctccattgacgtatgaaattttgccagggaaaacgcccacgcgacaccagttcataaacggttaagccctccggcaataatggcgactgcggcaagatcccaagtctacgggataacgctttcgttggttgctcgtgaatcgctttgccatcaagcaatatcgaaccgcccataggttgcaagatacgtgcaatggtgctgagcaacgtcgactttccacagccgtttgccccaaccagaacggtcattttttctgtgggaacggagaaagaaacaccatcaacaatgatcttcttgtgatacccggcagaaacattgtcgaggatcagcccctgcccttttgcgttatgtgccacgtgtacgccaacttaatcaaagacaaacaaaaataaaactcattctcctttgagagtttgacgccacaaaatgtagtagtcaagcagttaaaagccacacaaaaacaaggtaaataacaggtaaactatttttatacataaaaataaaaacattaaatatcaataaattaaaagcaatcaaattgtataaacttttcataaaaacacatgtagcaattttttgttatttctcatttactactacattactgcgtgattgaatgattctcaattacatatccgatggcgaaataacaaacggatagtgcttagtgagcaataagaaacaattttcactcgcgacaatccgcgagtttttgggataacagactaaatggctatgttcacaccttcattctcaggactcaaaggtcgggcgctcttttcactgctttttgcggcaccgatgattcatgcaacagactctgtaacgaccaaagatggcgaaacaatcactgttacagcagatgcaaataccgcaactgaggcaaccgatggttatcaacctctgagcacctccacggcgacattaaccgatatgccgatgctggatatcccgcaggtggtcaatacggttagcgatcaggttctggaaaaccagaatgcgacaacgctggatgaggcgctttataacgtcagtaacgtggtacagaccaatacattaggcgggactcaggatgcttttgtacgccgtgggtttggcgcaaaccgggatggctccatcatgaccaacggtctgcgaaccgtacttcctcgtagtttcaacgccgcaacagagcgtgtggaagtgctaaaaggcccggcctccacgctgtatggcattctcgatcctggcggactgattaacgtcgtgaccaagcgcccggaaaaaacattccatggttcggtttcagccacctcctccagttttggtggcggcactgggcaacttgatatcacaggtcccattgaaggcactcagctggcgtatcgccttaccggggaagtgcaggatgaagattactggcgaaacttcggtaaagagcgcagtacatttattgccccgtcactcacctggtttggtgataatgcaacagtaaccatgctctattcccatcgggactataaaactccattcgatcgtggaacgattttcgaccttacgacgaaacagcccgtaaacgttgatcgaaaaatacgttttgacgaaccgtttaatattacagatggtcagtccgatctggcgcaactcaacgcagaatatcatctcaatagccagtggacagcgcgctttgattacagctacagccaggataaatacagcgataatcaggcgcgtgttaccgcgtatgatgcaacgacaggaacactgacacggcgtgttgatgcaactcagggatctacccagcgtatgcatgctactcgtgcggatctgcaagggaatgttgatattgccggattctataatgagattctgggtggggtgtcatatgaatattatgatcttctgcgtacagatatgattcgctgtaaaaaagctaaagatttcaatatatacaaccctgtttatggtaataccagcaaatgtacaacggtttcggcgtcggacagcgatcagacgatcaaacaggagaactactcagcttatgcacaggacgcgctctatctgaccgataactggattgccgtcgccgggatccgctatcagtattacacgcaatatgcgggtaaaggccgtccttttaatgtcaatactgacagccgcgatgaacaatggacgcccaaactggggttagtctacaaactgacgccatcggtatccttatttgccaattattcgcaaacatttatgccgcagtcgtcaattgccagctacattggcgatcttccaccagaatcatctaatgcttacgaagtcggggcaaaattcgagctattcgatggtatcaccgcagatattgcgctgtttgatatccataaacgtaatgtgttgtataccgaaagtattggtgatgaaaccatcgccaaaacggcaggccgcgttcgttcaagaggggtagaagtcgaccttgcgggagcattaactgaaaacattaatatcattgccagctacggctataccgatgcaaaggttctggaagatcctgattatgcagggaaaccattgccgaatgttcctcgtcataccggttcgctattcctgacctatgatattcataacatgccaggcaataacacactgacgtttggcggtggcggacatggtgtaagccgtcgttcggcaaccaatggggctgactattatctgcctggctatttcgttgccgatgccttcgccgcatacaaaatgaaattgcagtatccggtcactctgcaattaaacgtcaaaaacctgtttgataaaacgtattacacctcttccatcgccacaaataatctgggcaaccagattggcgatccgcgtgaagtgcaattcacggtgaaaatggaattttgatcaaaaaagcccggtatacacttgtataccgggctatgttttattcttctggcgggaggattatcag

SEQ ID NO: 153 - DNA, 3695 bp, Escherichia coli
tacagcttaatattgccccgataagcggggcaatctcttataatccaccattcataactcccatcaatatataaacacatacatatccaacctttatttaacattaatactcaatttaatgttaaatcgtcatatgcaagcgatattgtaattaaagtaagtgaatacatcacaacataactatttgatattatttaaatactttacttttatctcaccagatttaaatttaataattaaaaaacaatgttgcagggatcacactacacagtattgaacattgtgattgatatattgcccccctactatccattaaacataaatatttgtttcaccgaataacaacatatttaaaagaaacacaaaaacattctcactctttattgaattaatatttatattcacgtaacgaatttattagcaccctctcaacagtcgatattcatcattattatatatttgcgttatataaggagatatatccatgtttgataaatatagaaaaacactcgtagccggaactgtggcgataaccctgggtttgtcagcatcgggggtgatggctgcgggttttaaaccagcgccacctgccgggcaactgggtgcggtcattgtcgatccctacggcaatgcaccactgaccgctttggttgacttagatagccatgttatttctgacgtcaaagttaccgtccatgggaagggcgaaaaaggcgtagaaatcagctatcccgtgggtcaggaatcactaaaaacttacgatggtgtaccgatttttggtctttatcagaaatttgctaacaaagtgaccgttgagtggaaagaaaacggcaaggtcatgaaagatgattatgtggtgcacacttcggccatcgtcaataattacatggataaccgctctatctccgatttacaacagaccaaagttattaaagtcgcaccgggttttgaagatcgcctctatctggttaatacccacacctttaccgccyrrggytscgatctccactggcatggtgagaaagataaaaatgccggtatccttgatgcgggtccggcaaccggcgcactcccttttgatatcgcgccctttactttcatcgtcgataccgaaggtgaataccgctggtggctggatcaagacactttctacgatggtcgtgaccgcgatatcaacaagcgtggttatctgatgggtatccgcgaaacgccacgcggcacctttaccgctgtacaaggtcagcactggtacgagttcgacatgatggggcaggtgctcgaagatcacaaactaccgcgcggatttgctgacgccactcatgagtccattgagacgccaaatggcacggtactgttgcgcgtaggtaagagtaactatcgtcgcgatgacggcgtacacgtcaccaccattcgtgaccatatcctcgaagtcgataaatctggtcgcgttgtcgatgtatgggatctgaccaagatcctcgatccgaaacgcgatgcactgctcggcgcgctggatgcaggtgcagtttgcgttaacgttgaccttgcccatgcaggacaacaggcaaaactggaaccagatacaccgttcggcgacgcgctgggtgtagggccaggccgcaactgggcgcacgtgaactctatcgcctatgacgcaaaagatgactctatcatcctctcctctcgccaccagggtgttgtgaagattggtcgtgataagcaagtgaaatggatccttgcgccctctaaaggttgggaaaaaccgctggccagcaagctgctgaaaccggtggacgctaacggtaaacctattacctgtaacgaaaatggcctgtgcgaaaactcagacttcgattttacctacacccagcataccgcctggatttccagtaaaggaacgctcaccatttttgataatggcgatgggcgtcatctggaacaacctgccttaccaaccatgaaatactcccgctttgtggaatataagattgatgagaagaaaggcaccgttcagcaagtgtgggaatacggtaaagaacgtggctacgatttctatagcccgattacctccatcattgaatatcaagccgaccgtaacaccatgtttggcttcggtggttctattcatttgttcgatgtcgggcagccaaccgtcggtaagttgaacgaaatcgattacaaaaccaaagaagtgaaagtggaaatcgacgtgctgtcagataaacccaatcagactcactaccgtgcgctgttagtccgtccacaacagatgttcaaataattaagaagggaataaaaatgtcgaaattagggatctcatcactatttaaaaccatactgcttaccgcagctttggctgtttcatttaccgcttctgcatttaccgaaggcacggattacatggttctggaaaaacctattccgaatgccgacaaaacgctgattaaggtatttagctacgcctgcccgttctgttacaagtacgacaaagcggttaccggtccggtatcggaaaaagtgaaagatatcgttgctttcacgccgttccatctggaaacaaaaggtgaatacggcaaacaagcaagcgaagtctttgcggtcttgatcaataaagataaagcagcaggcatttccttatttgatgctaactctcagtttaagaaagccaagtttgcctactacgcggcttatcacgacaaaaaagaacgctggtctgacggtaaagatccggctgcttttatcaaaaccggtctggatgccgcaggtatgagtcaggcggattttgaagcggcactgaaagaaccagcagttcaagaaacactggaaaaatggaaagcctcttatgatgtcgccaaaatccagggggttccagcctatgtcgttaatggtaagtacttgatctacaccaagagcatcaaatccatcgacgcgatggcagaccttatccgtgagttagcaagcaaataacagggaaacaggctatgggtattaagggaatgtggaaagatcttcgcacatcaccagttgacacactggtcagatggcaggagcaacgcttgttgtggttgttaatggccgttgcgatgggcgcgttaattatcctggcgcactctttcttccagatctatctctacatggcaccctgtgagcaatgtgtatacattcgctacgccatgtttgtgatggttattggaggattggttgcagcgatcaacccaaagaacatcatcctaaagctaattggctgcgtgatggcattttacggcagcattttgggactgaagttttcgctcaaactgaacgatatccaccatgcagtacataatccggatcccgattcactgtttggcgtacagggttgctctaccgatccaacttttccctttaacctgccgctggcacagtgggcaccaaattggttcaagcctaccggggattgtggctatgacgcaccaatcgttcctgatggcgtcacactgagcagcacgcaacagtggtttgtggaaatgtatcagcaatctgaaggctggtatctgctaccaccatggcattttatgaatatggctcaggcttgtatgctggcttttggtatgtgtctggtgctgctggtcattatgagtggcgcatgggcgcttaaaatcatcagaggctaactcagcaacacccgaagccagtcattctggcttcgggttctt

SEQ ID NO: 154 - DNA, 5481 bp, Escherichia coli
gtaagtgttgtattatataccatatctggttaaaaaaagaacaaccaagactattaatatatattatcccccgataaaacattactaattaataatataaattaataagcatcgctagatatatattatatcttcacgattattaagcccctactcgttataataagtatacactcccccctttacaacattaggcgtaaacctttgtcaacaaacggttgttttttcgccgcaattcatacaaaaaaattatcacaaataacgataaacaacaaatatctagatatatacacctcaatatataacggggaattatattttaagttttacttaatcagcatttaatataaataacgagtcaaattatctctggttatggtaatgtccatagctgaattaatattaaattcaaacctgtattttcctcatccatttataaaggattatagtcatgttaaaaaaaacattgttatctatgttcgcaaccgcattgttatcaggcgttgcttttaacgctcttgctgacgatgctaatcagggttcaggtaaaattacttttaaaggtgaagttatcgatgcaccttgttctattgctcctggtgatgaagatcagacaataaacctcggtgaagttgctgataccgtattaaaaagcggtcagaaatcactgcctgtagatgtcaccattcatttgcaggattgtattttatctgacggcactaacactgttgataaagtcaaaatcacctttagttctgccagtgttgacgctaccgactccaacctgcttaaaaacactctggaaggtaacatcggcggcgcaactgatgtaggcgtacgtctggtgaaatcagacaacaccaacgtgactcttggcactccaatcactatcaacttcccgacgactaactcttaccaggagttgaactttaaagcccgtatggagtctctgggacgcaccgcgaccccgggtaacgtgcaggcacaggctaattacgtactcgactacaagtaatcggtagtcaatacctacacaacgccaggcggtraagccgatgaaatttcatcggcaactttgggcctttttagaaatggatttttatgaacaataaaaacacgttttcccgggataagttatcccatgcaattaaaaatgccctgtctggcgttgtgtgttccctactcttcgttttgccagtccacgccgtagaattcaacgtcgatatgattgacgcagaagaccgtgagaatatcgacatctctcgttttgagaaaaaaggctatatcccccctggtagatacctcgttcgtgtgcaaataaataaaaatatgttgccacaaacgttaatactggaatgggtaaaagccgataatgaaagtggttcgttactctgcttaaccaaagaaaatttgactaatttcggtcttaatacggaatttattgaatcattgcaaaacatagctggcagcgaatgtctcgatttaagccaacgtcaggagttaacgacacgacttgataaagctacgatgatattatcgctaagtgttccccaggcatggttaaaataccaggcaacaaactggacgccaccagagttttgggataccggtatcaccgggtttatccttgattacaacgtgtacgccagccagtatgccccacatcacggagacagcacccaaaacgtcagctcctatggtacgttaggctttaacctcggcgcatggcgcttacgtagcgattaccaatataatcagaattttgctgatggacgctcggtaaaccgcgacagcgaatttgcgcgaacttatctgtttcgccctatcccctcctggtcgtcaaaattcactatgggccagtacgacctgagctccaatctttacgataccttccactttactggcgcatcgctggaaagtgatgaaagcatgctgccgccagatttacagggttatgcgccacaaattaccggcatcgcgcagaccaacgcgaaagtaactgtggcacaaaatggtcgtgtactttatcaaaccactgtcgcgccaggcccttttactatttctgatttggggcaatcgtttcaggggcagctggatgtcacagtggaagaagaagatggccgcaccagcaccttccaggttggctccgcatccattccctatttaacccgtaaagggcaagtgcgctataaaacgtcactgggaaaaccgacatccgtcgggcataacgatatcaataatccctttttctggacggcggaagcctcctggggctggctgaacaatgtgtcgttgtatggtggtggcatgttcaccgctgatgattatcaggctatcactaccggtattggctttaaccttaaccaattcggttcgctttcttttgatgtcactggagcagacgcgtctttacagcaacaaaatagcggcaatctgcgtggttacagctatcgcttcaactatgcaaagcatttcgaatcgacaggcagtcagattaccttcgcgggttatcgcttctcagataaagattacgtgtcgatgagtgagtacctcagctcgcgtaatggcgatgagtcaatcgataatgaaaaagagagttatgtcatttccttgaaccagtactttgaaacgctggaattaaactcttatctcaacgttacacgcaatacttattgggacagcgccagcaataccaactactccgtatctgtaagcaaaaactttgatattggcgatttcaaaggtatatctgcatcgctggcagtaagtcgaatccgctgggatgacgacgaagagaatcaatattacttctctttctctctacctttacaacaaaaccgcaacatctcctacagtatgcagcgaacgggaagcagtaatacttcgcagatgatttcctggtacgattcatcagatcgcaacaatatctggaatatttcagcgtcggcaacggacgacaatatacgtgatggcgaaccaacactgcgcggcagctaccagcactattcgccgtggggacgcctgaacattaatggcagtgtacagccgaatcagtacaattctgttaccgcaggctggtacggttcacttaccgctacacgtcatggtgtcgcccttcacgattatagctatggcgataacgcccgcatgatggtcgataccgatggcatctccggcattgaaatcaactctaaccgtaccgttaccaacgggctgggcatcgccgtgataccttcgttatcgaactacaccacctccatgttgcgggtgaacaataacgatctgccagaaggtgtcgatgtcgaaaactcggttattcgtactacgctcacccagggtgccatcggctacgcaaaactgaatgccaccaccggataccaaatcgtcggcgttattcgtcaggaaaatggccgcttccctccactaggtgtgaatgtcacggataaagcgacaggtaaagatgtgggcctggtagcggaagatggcttcgtttatctcagcggtattcaggaaaacagtattctgcatttaacctggggtgataatacctgtgaagtcacgccgccaaaccaaagtaacattagtgaaagcgcgataattttaccttgtaaaacagtcaaataattcaggatgaatataatgaaattaccattaatcacaacaggaatgatttgttttctggggatctgcaactttgcccaggcgactgtctcccccgacaggacacgcatcatttttaatgcttcgaataaaagcgcaacggttcgcctgaccaaccaaagtaaaatcgatccttatcttgctcaatcgtggattgaagatgccagcggtaaaaaaacgcgtgattatatttcaacactgccgccgatggaacgtattgagcctgatgaacaggtacaaattcgcctgatggcgctggcctcgttaaataacttaccacaggaccgagaaacgctattctactataacgtgcgggaaattccgccgcgtgccaaagaacagaatgtcatgcaaatcgccatgcaaagccgtctgaaactgttctggcgaccgaaagcgattgagttaaaagaaggagagatggttcctctgcaaaaagtgacgattacccgcaccgccgccgggctgaccctgaataacccgacgccttatcatattaccgtcggctatatcggcactaatggcaagacactgatgcctggtgcggacagtattatggtggcaccatttgcttctgcgactcaacacttaaacaacctgccctctacgttccagttaggctttgtggcggactacggcgggctggagatgtttaaagtagtatgtaattccgtccagtccctctgccaaagtactcctgcgaagaaggggaaaatatgattacactttttcgactactggcgattctttgccttttttttaacgtttcagcttttgctgttgattgctatcaggatgggtacagaggaacaaccctcataaatggagatttaccaacgttcaaaattccagagaatgcgcaacctgggcaaaaaatttgggagagcggagatattaatatcacagtttattgtgacaatgcaccaggatggtcaagtaataacccatcagaaaatgtctatgcctggatcaaattgccccaaataaatagtgccgatatgttgaataatccgtatttaacatttggcgtgacttataatggtgtagattatgaagggacaaatgaaaaaattgatactcatgcgtgcctggataaatatgaacaatactataatgggtattatcatgaccctgtatgcaatggcagcactcttcaaaaaaatgtaacatttaacgcccattttcgcgtctatgtaaaattcaaaagccgcccggcaggagatcagacggtaaactttggcacagtcaacgtgctgcaattcgacggtgaaggcggggcgaacatggcccccaacgcgaaaaatttacgctatgcgattacggggttagataatatttcattccttgactgtagtgtcgacgtccgcatttccccggaaagtcagatagtcaattttgggcagatcgctgcgaattccattgcaactttcccaccgaaggcagcattcagcgtttctaccataaaagacattgcgtctgattgtaccgaacagtttgatgttgcaaccagtttctttacttcagatacattatatgacaatacgcatctggaaataggtaacggcttgctcatgcgaattactgatcaaaaaacgcaagaagatattaaatttaaccagttcaaattatttagtacttatattcccggtcagagtgcggcaatggcaacccgcgattaccaggccgaattaacccaaaaacctggtgaaccactcgtctatggcccatttcagaaagacctgatagttaaaatcaactaccactaaacagcaaaatgccgggaacaccccggcattttcatatttagtatttcatctcatt

SEQ ID NO: 155 - DNA, 74 bp, Escherichia coli
gcgcgctataatccggtagcagaacttcaatctcctccggctatcccgccagttgataaagcagaataaagcac

SEQ ID NO: 156 - DNA, 1841 bp, Escherichia coli
ccttcctccactgggtactccccccaacgtaggcgggaggggaatttgggctgttaagcccgcagtttatcagccacgctgattctgaatatactttttcacaacttccagcggtgctccaccacatgaaccgatgaaataagagcgtgaccagagtacgggctttgaatacgcggcgcgcaaatcaataaaatcattccgcagccgcctactggtaacggacttaaggctgtttaccagctttgtgagttgcaccaacggtgggtattcaatcagcatgtgaacatggtctgcctcgccgtcacattcctttaactcggcgccaaagtccgcgcatacctccgctacatactgacgcatgtttgcatgatgcaattcaccaaaaactggacggcggtattttgtcataaaaacaacgtgaacatgcaacaggtaagctgaatagcgtgaacgattgatttcgcacacgtattgaccctcccaaaaaaatgtggatatattgtacattctaaacaaccacatactgaatgcaaaatgttaatccagaaagcatataaatacaggctctaccccactgaccagcaggcgcaaaggttgcgtcagttgtgcggttgcgctcgctttgtctggaactatgcactgaatgaaacactgagcattcatgacgcgggcggaaaaattccgtcagctttcgacctgaataaacgacttacgggctggaaaaaactccctgagctggcctttctttctgagggttacactgacaacctccagcagaaactgaaagacctgcggagcgcatgggatcgctgttttgataaatccctgacggctgaaaagcccgttttcaaaaagaaaaccaaaggctgcgactctatccggttcgtcaatttcagcaaatattgtgggctggattatggccgtgtgaaactcccgtcaggactgggctgggttaaatttcgtcagtcccggaagattgaaggcgtcattaaaaattgcaccatcagccagcatgccggacactggtatgtgtcttttcaggtcgaattagctgttaccgatccgattcacgcatcgaccagcgcaataggcctggatgcaggtataacgaagctggcaacactttcagacggcacggtctttgaaccggtaaacagcttaaaaaaaaatcaggataagctggctcgcttacagcgccgtctggcccggatggttaaattctccgccaactggaaaaagcagaaagcgaagatttcccgtttccactctcatatcgcaaacatccgccgcgattaccttcataaaaccacgacgacgatcagcaaaaaccacgcgatgatagtcattgaggatttaaaggtttcgaacatgtcaaaatcagcagcgggtacggtagaccagccggggcgcaacgtcgcggcaaaatcaggtcttaaccgggcgatactggatcagggctgggcagaaatgcgccgccagctcgaatataagcaggcatggcgcggcggtgatgtactggcgattaatccggcgtacaccagtcagaaatgcgcatgttgtgggcatacatcgaaaaataaccgcaggacgcaggcgagctttatctgtaccgcgtgcggctatacggcaaacgccgatgtaaacggcgctcgcaatatattaacagcaggttttgaagtcatggcggcaggacaaatattgccgtcagtccgtaaaggacgcgcccgtaaggcggcgtaagccgtcgagcgaggaaccggggaatgcggcaacgtattgctaccctgacaagggaatccccctcctgagtcgctttgcgcgaaggtgggggaggatgtcaa

SEQ ID NO: 157 - DNA, 64 bp, Escherichia coli
ttaactttttaaattcagtatattgcagaaatcccttaggtcggataagacgcacaagcgtcat

SEQ ID NO: 158 - DNA, 46 bp, Escherichia coli
  misc_feature (12)..(12): Unsure
  misc_feature (14)..(14): Unsure
agtccawttacnrntcccttgcgtttgcttcgcggaaagcctaaat

SEQ ID NO: 159 - DNA, 61 bp, Escherichia coli
tttaggttataacgcccaaatgattcaacgatcggacaatacctgcgaacttacaattaat

SEQ ID NO: 160 - DNA, 2326 bp, Escherichia coli
ggatggcggagaacgccgatacacgcggcattgaacgcgtgaactatctggcattgctggcactcggcactttctattttctctgcgctttcctgcctatctacttcggcgcagaacatgccaaaaccatcattgatgtcctgccgcaacgattaatcgacggcctcggcgtcgcgggcggcatcatgccagcaatcggttttgccgtgctgctgaaaatcatgatgaaaaacgtctacatcccctacttcatcctgggctttgttgccgcggcctggctcaagttaccggtgctggctattgctgccgccgcgctggcgatggcgctgatcgacctgctgcgtaaatctcctgaaccgactcaacctgcggcacagaaagaggaatttgaagatggcatctaatcaaaccaccctgccgaacgtcagtgaaaacgaagaaacactgctgactggcgtcaatgaaaacgtgtatgaagatcagagcattggcgcagagctgacgaaaaaagatatcaaccgcgtcgcctggcgttccatgctgttacaggcttctttcaactacgaacgtatgcaggcttccggctggctgtacggcctgctgccagcactgaaaaagatccacactaataaacgcgacctggcgcgcgccatgaaggggcatatgggtttcttcaatacccatccgtttctggtgacgtttgttatcggcattatccttgcgatggagcgttctaagcaggacgttaacagtattcagagcaccaaaattgccgtcggtgcgccgctcggcgggattggcgatgcgatgttctggctaacgctactgccgatttgtggcgggataggtgcaagcctcgcgctacaaggctctattcttggcgctgtcgtctttattgtgctgttcaacgtggtgcacctggggctgcgttttggtctggcgcattatgcttaccgcatgggcgtggcggcgattccactcattaaagcaaataccaaaaaagtcggccatgcggcatctatcgttgggatgacggtaatcggcgcgctggtggcaacctatgttcgtttaagcaccacgctggaaatcaccgcgggcgacgcagtggttaagttacaggctgatgttatcgacaaactgatgccagccttcttaccgctggtctacaccctgaccatgttctggctggtacgccgcggctggagtccgctgcgcctgattgcgattaccgtggttctcggcatcgtcggtaaattctgccatttcctttaaatacaatgaggtattagatgttaagtattattttgacagggcatggcggatttgccagcggcatggaaaaagcaatgaagcaaattctcggtgagcaatcgcagtttatcgccatcgattttccggaaacctcaagcaccgcgctgcttacatcgcagcttgaagaggccatcgcccaactggattgtgaagacggcattgtttttctgacggatttgctgggcggcacgccgtttcgcgtagcttcaacgctggcgatgcaaaaaccgggctgtgaagtgatcaccggcaccaatttgcaactgctactggaaatggtgctggagcgcgaagggttaagcggtgaagagttccgtgtgcaggcgctggagtgtggacaccgtgggctgaccagtctggtagacgagttaggccgctgccatgaagaatgtccggtcgaggaaggaatatgacacacgttctgcgcgccagaaggctgctgactgaagagggatggctcgatgaccatcagttgcgtattgctgacggtgtaatcgcagcaatcgaaccgattccagtgggcgtgactgaacgcgatgcggaactgctctgtcccgcttacatcgacacccatgtacacggtggtgcgggcgttgatgtaatggatgacgcgccggatgtgctcgacaagctggcaatgcacaaagcacgcgaaggtgtcggcagttggttaccgaccaccgtaaccgcgccgcttaataccattcatgcggcgctggaacgtattgctcaacgttgccaacgcggcggacctggtgcgcaagtgctggggagttatctcgaaggaccgtacttcacgccgcagaataaaggcgcgcatccaccggagctgttccgcgagctggaaattgccgagctggatcaattgattgccgtttctcagcataccttgcgcgtggtggcgctggcaccggaaaaagaaggggcattgcaggccatccgccatcttaaacagcaaaacgtacgggtgatgctggggcatagcgcggcgacctggcaacaaacccgtgccgcg

SEQ ID NO: 161 - DNA, 99 bp, Escherichia coli
taaccatttcacatgcgtgattgatgaaatgtgtcgtcgttaactcgccaggtaaaggcgttgtagcgctattcctgctgcgacgcctgtaatcactct

SEQ ID NO: 162 - DNA, 70 bp, Escherichia coli
aatgcgttagcggataataacgacgctatcgtagcacagtatcaaagtcaggcgaaaagatgacagatag

SEQ ID NO: 163 - DNA, 8678 bp, Escherichia coli
tttgtgacgcgcggtgtttccatcgcgcttagcaaagaacgtaatcaacgccgggcctgttaatgctacccggcgtttttattgccgttaactaacggtagcctgcaatttccgctttcaacgcgctaatttcagcatcgccatcaacaattcccagctcaaagcagtatttctttgtttcccctggttcaataaagggcagacgcccctgcgctcgttctttatcacgaccgtcaagaaaactattactgacctccagtcccataacatattcacccgcgcctaaatttttccactggataaagttgggtagctgcatgatgtcgaatttctcgtaaattccccaccccagttcggcgttcaccagcgcaactttactcatcccctgactgtcgctattcaacgtgagatagtaaacctgctcgtcaaaaccgggctgtggggtacaaatctccagatgactggctaacccttccgccgcatgcggggttcgtggcgttacgcttttagccgacagcaaaatttctgcctgtggcgataataaaggccagccgtaattaaagtgataaagaatttgcagcggctggcgggtgaaaccatgattagtcaccttgtcttcaatgcgcagcacattttcgccataacggcagcgaatggtcctttccagcgtcagattttcaccgaacaatcgtgtttcccgtactttgccattgatgacaaattcaatgctgtcgtcggtccgttctgtgcgataccccacctcttctgctggagtcgcagccaaacgcccgtgtaaccccagcgtttctccttcatcctcacagggcgtgccaatgtagctaagtccgcaggtagtcagtaaccccgcgtaaaagctacgtaaaaacccgttgccctgagactcaaaaaaagcgggggcgacaacaccgttgggggtgataaaagagagcgcagtgtccttgtagctggcccatgcaatatccagcgcgcgatcttttaccaccgtaaatgccagtcccgcaccagtacggacatcaaacgcttctgtaccctttgctctgccactacgtaactcatagtgtttaattccggcaacctgcgagagatcgccaatccacgaccaaatttcgcttttcattgtgctgcttcccgaatggacatgtcatggcgctggatgaacgtttcgatttccataaggcgagacgttccctccattgggccacgtcgggttaccgccagtgcaccgcaggcattggcatattgtaatgcccgatgggcgtcaaaccctagctggcggcaggcaatccatgcgccaccaaaacagtctcccgcaccggtcgggtcaacttcttccaccggatagctctcaacatgaaactgctcattcgcggagtagtaactggctccttgattgccgcgcttcacaatcacctctttaacaccttcttcaagaaaaccagcgattgcacgctccggtgtcgagtgtggcgacaagagcaacacttcgccctcgctgggcatgtagatatctgttaactcaagaacaaagtggagggcatcacgcatttctggaatatcgagcatctctttacgaatattcgggtcgaaagaaataacgccaccatttgctttaacgatggttactgcttttttaactgcgtctaccatatggaatgaaaacagggatgaacccataatatgaaaatgggtacaatccttcagaatattttcatcaacatgctgtgccgataatttaccgcaagcagcattcttgatattaaaaataaaatcgcgatcgccagagttatgataagtaacaaaggcactaccggtggcttccagaggtaagactgaaatccccctgatgtccacaccgtcagcagccagacgatgtatattaatatcaccaaagccatcattccccacgcagctaatgatgccgcacggaacgccaagacgtgtcacctggtcgataaaaatagcgggcgcaccactgggataagggccgttccagatacctggttgatcaaatggctggccgattttactcgccataatttcaaccagaatttctccaattgtgaagaccttactcatatgattaattccttgaaatgattagctgcgttttcttttatttcttacgtcaaaataaacggctacaagaatgactaatcctttaaccaccatctggtaaaaataaggaacattcattaagttcatgccattattaataacgccgatggttaatgcgccgatcaccgtccccaccacggttccatagccgccattcaggctggtgcctcccagtacagccgcggcaatagcatccagttcgtagctcaacgcggaattcggttgcccggaatagaggcgtgaggcaaggatcatcccgctgatacctgccagcacggctgtaatcataaagactttaattttcaagcgggtgacatttatccctgaataaattgccgcttctttattaccaccagtgatataaatttttcgtccaaaggttgttttagtaagaatgaagtggtttatcagcaataagatgattaatatccatataggaataggtatatagagaaattctccattccccagcgccagaaaagcatcatctttaatcatgatgggcataccatcggtcactatataagcgataccacggaagatccccatagtagcaacggtgacaataaacgaagggatccccgctatagccgtcaagccaccatttatcatccccaaagccagtgctgcaataatggataatgggaccaataaaacaaatggaattccccatgaagccccaagcgcagcaaatgtgccaatcaatgcaatggttgaaccgaccgataaatcaatatcgccaagcaaaagcacataagtcattccataggcggtaattgcaattatcgaaacctgaagaataatattagtaatgttattggcggtaaaaaaactgtcattaataaaactgaacagaatgattaacaccaccattccactgaggataccaccatattgcctgaagacttttttaaaattatttgcaatgggaatttccgaaggtttcggactggcaagagttttctctgtcatttaacgtactcctgttgcagcggtcattacctgtgtctgcgttaaattttcacatgaataaatatcggcaatcgttttattacgcattaccaccagacgatcgctaagtgccatgacttctggcagttcagaggacaccagaataattgctgtccctgccgcagccagttgacgtatcacgttatagatttcaaattttgcgccgacatccactccgcgcgttggttcatcgagcaataaaatacgcggagttttctccagccacttcgataacacgattttctgttgattaccgccgctcagtgctcccactgcctgatgcacagaactcactttagtgttcattctggcaattgattgcagcgtcttcgcctcttcttgtcggtgattgatgagtcccatccgcgaagcgttatattgaaacgccacatggtgcgtgttcatattgatgtcgtgcatcagcactaacccttcttccttgcggttttcggtcacaaaagcaatgccatgatcaatagcctggggattagcgatcctgacttccttaccatcaatcaacacagtcccgtgatacgaaacgaggccaaatagcgccttcatcacatcggaacgcccggcccccaccaggccaaaaaatccgaggacttcccccggacgcacagcgaaactgacctctttaaaaagcgaaggatgggaaagattttttacttccagttttgcaggaacattttcatccggtttttccccaagacgtgctggccaaatatttttcatttcccgaccaaccatttgggcaatcaagtgctggatatcactgtttttcttttcatgcgtagcgatatactcaccgtcgcggatcaccgaaatatcatctgaaatccgcataatttcatccatgcgatgagagatataaataaccgcacagcctcgctgctttaatttttcaataatgttaaacaggatctccgcttcattatcacttagcgaagatgtcggttcatccataatcacgacatccgctgcatagcttaaggctttagcaatttctaccagttgcctatgtgccatcgacatattgccgaccatttccagagggtctagtgggatgcccagttccgcgaggaggttctggcaatctgcgagcatttctttatcgttaattataccaaaacgtcgcggttcattattggcataaatattttccgccacggtcatattattactcaggctcagttcctgaaaaataatcgcaatccctaactggcgagaatgctgcggattattaatggtgatggtttcaccacgtagtgttatcgttccctgggttggcggataaacaccggccagtattttcattaatgtcgatttaccggcaccattctcgcctaataaagtatgcacccgccctttacgtaaagagagtgtaatatcttttaatgcctgaacatgaccaaatgtcttcgcaatatgcgaaacatcaagaataacatccgtcataatgacctcggtgtcacaacaaaacgccaataacgttttgttgtgaggtgaagatatttactatttacctgtataaacgccgggttgtaccgggatcattttttctaccggtttaccattgaggtgatcaacagcggcatcaatggctttagcacccatttgatcgggatattgccgaatcacggccgcaaacgttttttcactgtcaacggcatcacgcgcttctttcatgccgtcaaaaccaatgattttgatgttgtcgttatgcgcagattttgctgcgataaccgctgccagcgccgcatcatcaccaaagccaaacagaccattcaggttagcatttgcctgcataatgttttgcgcagtcgttaacgcttcagcccgcgtaataccaggctgttcagcaacaattttaatatccggtgtatcgcttaaccctttcttaaaaccatcaacgcgcgcaaccaccgattgtagtgccggataagaaataatggctacagtacctttaccatgcaaaagtttacccattaacttgcctgcttcaacgcctcccgcatagttatcggtcgcaacatgcgatacgaccggaacgccttccgcagcgacgtcaacggtgataacgggaataccggccttatcggctttaattatcgctgcctggacgcctttcgaatcgaccggagagataataatggcatccacttttttagtaataaaatcctcaacatcagaaagttgtttgtttaaatcctgattggcaatagagacacttaaattgacattgtctttttttgcctcttctttcatggcattcgcaagatcaatatagaaaggatgttgttgtgttaataatgacgcaccaattttatactcttttgccaacgaactttgcgagaacaatgccaggctcaccaacatagctgaaccaagtaatttaatatttttcataaacaatcctcattatttttgtagggtacaacgtcttaaatttttccttcactaccacagacgccaataatacgagttacgacttctttcatggcggcctttgcgggctgcatatagtgacgtggatcatttgccgcaggattgttgtagaaatatccttttaacgcatcggcaaacgcaattttcaattctgtcgcgacattcactttacaaataccgcgacgaatacagtgctgaacgtcctgttccgataagcccgaagcaccatgcaacaccagcggaatctccactcgctgacgaatctgttccagccgcacaaaatccagtcgtggttcatgcgcatataaaccatgtgctgtgccgattgctaccgccagggagtcaatttgggtacgttgaacaaactctgcagctgcggctggtgaggtataagcggaatctttttcatccacccgcagatcgtcctcctggccgccaagacgccctagctcggcctcaacgctaacatcaaagcgatggcaaaaggtggtaacttcttgcactcgcgcaatgttgtcttcaaatggcaaatgggagccatcaatcatgacagaacggatccctgcgcgaaccttgttaaaaatgtcatcactctcttcatgatggtcgagatgcaggactaacggcaggttgtactcgcgagccagcgattgtactaacgaaattaaacttcccacgccaccataacgatatgtaccgggtgttcccgccagcataacgggagagcgaagttgtgcagcgctctcaacaactacctgtaaagtttcaaggttatgaatgttgaaagcagggacggcatatccctctgactgggcttttttcagcatgtttttgcttgaaataatatacatcgcagctcctgttattggtcgttcgccttacaaaatgaagaaagagaatctttactttcattttgaaagcaaactagcacagcaaaagcagcaaaaagcgtgatgcatgtcgaacatcatcaaaataacttacaaaaaataacttaatttatttttcactttgcaagtgaaaccaatgaaaaccctgcataaatatgaatatattcatttatttttcaatgtattaagctattttcgttgcaatttttgacccatgattttcttttcgaattgtcgatatgattgaaggataactttcaaagaaaaatacaaggggctatagtgttacgcattaaaggccaatgaagagtgttaacgtgccgagaaaatcgtctaacctactgaaacgcagattaaaaattgcagaaattgttgccgcccagggtgaaatcaaagttgatgacttatctgcgcaacttggtgtctctggcgtgacgatccgcggcgatctcagttatctggagcaacagggatatttaaagcgatcatttggcggtgctattgcgacaccactctcctctgaaccagaagcgatacaaccgatcgcgccattgtctctggcacaacaaatggaaatagcacgacattgcgcacgattaattcgcgatcgtgacacgctatttcttggacatgggataatctgccgtaagatcattccattgctcagcgaagtgaaaaaactgcgtctgatcaccaacgatcccgaacatgcgctgctggcaaatcagtttattgatggcgaaataatactggctggcagtgaaatgttgcgccccgacaccgcactggccggaaaacagcttgaacaggcacttcagcatttcaccattacacatagcatcctggaaatcagccatctggatgctgatggtactttaaatatcaacgttcccagactcgccgctgcctggcagctctgtttcgatcatgcccagaataagacggttatcgttgccgccgatcctgcgccatcaacggctgctatcgggcatttgcatcaggcagaaaatgtgatcgtcagccgcagcattaacgaacaatatcagcaacaattgcagtcggctgatttcgttatcctttataccagtaatgagtgctttacctggtccaatcgcgaaaggcttcaggaatgagaggggttttgtgacaacaactatctgcgctatgggcgaattgctggccgagtttttgtcccgcaacccacatcaaaaattcactcagcctggggagtttatcgggccatttcccagcggtgcgccagcaatttttgctgctcaggtggcaaaactgtcccatcgggccatcttctttggatgtgttggtaatgatgattttgcccgactcattatagagcgtctccgtcatgaaggtgtcattaccgatgggatccatgttatgaacaatgccgtcacaggtacggcgttcgtgagttatcaaaatccccagcagcgggatttcgtctttaatatccctaacagcgcctgcggtttgtttactgccgagcacattgataaggatctgcttaaacagtgtaaccatctgcatattgtgggctcatcgttgttctcatttcgcatgatcgatgtcatgcgtaaagcaataacgacgatcaaatcggctggcggcaccgtttctttcgatcccaatattcgcaaagagatgctgagcattcctgaaatggcgcaggctctcgattatttgattgaatatacggatatttttatccccagcgaaagcgaactccctttcttcgcgcgtcacaaaaatctgtcagaggaacagattgttagcgatcttctccacggcggcgtaaaacatgtggcgataaaacgcgcccagcgtggggccagctattacaagcttaaaaacggtacattacacgcccagcatgttgcaggtcacgatatcgaaattatcgatccaacgggtgcaggcgactgctttggcgcaacgtttatcactcttttcttatccggtttcccggcacacaaggcgctgcaatatgcaaatgccagcggcgcgctcgccgtaatgcggcaaggtccgatggaagggatatcctcactggcagacattgaagactttttgcagcagcactgaacggcaattttctgtcagattattttccctgcctgaagacttgccgtagaattgcccgtttctcgtatccccccatgaggaggaccccttccg

SEQ ID NO: 164 - DNA, 458 bp, Escherichia coli
ttgtacgttcaaatttttctttagacacggctatattccttactatagtgctctccccttcaggagagagcacgggactttggtattaacccttaggcttatttaccacgggcttcaattacggcctgagcaacgttactcggcgcttcatcatacttcaggaattccatagtgtatgatgcgcgacctttggtcagagaacgcagctgagttgcatatccgaacatttcagacagcggtacttcagcgtggatcttaacgccagtaacttcagattcctgacctttgagcataccacgacgacggctcaagtcaccgataacgtcaccggtgttctcttcaggagtttctacttcaaccttcatgatcggctcaagcagaactggtttcgctttcttaaagccttctttaaaggcgatagaagcagccagtttaaacgccagttcagaggagtcaac

SEQ ID NO: 165 - DNA, 75 bp, Escherichia coli
atcagacctacggattcaatgcaatttatcgcaggtaagataatgtgccgaatccaataaaaatcagatatgcgc

SEQ ID NO: 166 - DNA, 773 bp, Escherichia coli
tatctcattgaccccttatccaaacggataaggggtttttttatatctaattagctaccaatatgtacacttataattatcaatagaccgcaggatgcattatgttcacctttattgaactacaaggatttagcaaacgccgccagttattgctacctgataagtagttccgggcttttcaggaactactcattcaagatcccactgccggtgacattatcgcaggcacaggcagttttagaaaaattcgctggaaccgttctggaatggggaaacggggtggcattcgaataatttattacaacgtaacacgcaatggtcgaatttatctggcgttgatttatcctaaaaatgaacaggatgatttaacagaagaacaaagaaaggcattgaaactattgtccgagaagctgctttaatgttgaagctccacaaattccaccatggtcgaaatgccaacggagacattgaaaacagatgaaagatgaattatttgctgatcttcttgccagcgcagaagaaatggtacgcatcgaaaagggtgaagaaacgcctgaaccagagcacgtccatacttttagcgaaatcgatgtaaaagcgatccgtgaagcaacgggtttacgtcagcaagattttgctgtcgccgtaggggtaagttatgacctggtcaaaagctgggaaaccaaacgccgtcagcctaccggagcaccccgaaaattgctcctgcttttgcaagcgaatcctttcattatcaatcaattgaaaacaatcta

SEQ ID NO: 167 - DNA, 9972 bp, Escherichia coli
ggatgatgcccggttgtgaagtgcaaccgggctatttgaattccttagactattcattgtaaataattgaataacggccccagagctaaaatcgccaaacttaagcacgttacccaatcgccccacttcttcctatggcttctatttttgctacgccactggcaataatatcccaacgcaaaaccaagctgggcactaatcgggccgacaaaatcagtccacggctgcggccaaaaaggggaaaaattcaggggaagccagacaaatgtcagaaagaaatttcggatattttccagcaacgctgatttctctggagaaatataaagaatgaaattcgagagaattaaccagaaatagaccggagaaaagaccagccagcaatgtagcctgttttttaattcaggaggcgttctgcgggagaattgccaaccgatgccacccattacactgaaaaaaagtgcatatacaaccaataactcaagttgtaattcctgaagagaaatacgcacaaccaggagcggaaaggagaatattatttccgccagaaaagttaacgtgaatataagtacggctaaggcaataaccgtcggccataccaataatggtacgataacaaaaccgagaattacagggggaatataaagccggaatttaatcatttttattttcctggtgattcggatgatgcgtcatacatcgcgcataaacactcatcaatcatccagtcgtcttcccagatctgatactgtgtgccctgttcgggctgcttaagcgggttctcaatcgcctgccgcgcgcgttctttcaggatggattgattgttgaaggcccaggcattgatttgggcggtaatggctttatcgatatcgtcctggttatctctgatataaccgtcacgatacgtattcaataaacaggcaagagacgctgccgaccaaaatccgggaactgaaataatggcatcaagcaatggcgaaagagcgatatcggcacggaaaaacatttccagcttgtactgtaattcgacagcctcatccccggatacccaatcagtcatatactggcaagcaaattgctgcaatatttcccgttcatcctcacgccagttttctttactggcaaggtttatacgccgtagagaaaatacttcgtgaatattgtcaaattgcccctgcgcaacaaactccagtaaacgaggcagaaaataacgaacctcatcgctgttttgcggatcaggtcctggactactattccaggcattgattaaggaataaggaatcgctcgcaacgatgtattccgtaatgctttttgttcctgttgactcagacaatattcacaacaaaccacaaattgcttcggcgccggataacgacgaaaaatatgatatatctgctcaattaatgcctgcatggcaggagtggggtgcataattaccccctcgcccgctgatcgcgtgtaaagggttgatagacaaaacgagcattcgccgcattcaggcgaataatggcactacgagagagggaaaagctgggccgaatgcaataattacagtcccaacagctttcctctgtgcaattttccactgagtaatgacgcgcgtagagtttcagttcagcctgcttatcgcgaaatccgcgtaaactgttatcgttttgaaattgccaggcttctttaaacacttgaaagatataaacatcctcaatccaggcgtcacattttttaagcggacgctttgctatgatcacccgctcatccgggttgagcatcgccgtaaattgtacggtgaagtcatttgtcgtgttcagatcacattgaacatctggtacatcactgatatagaggtcaaatccaaagtcagcaccacaggcacaaagacggctaatggtggcggtatcgagggaaaatcccggccatacattgctggacgttaaaccaatatttaatgtgacatcatatcgagataatccctcaagaccggcagcaccggcgaacttttccccttcatccaggacctggttaatgagttgctgaacaatgccttcatcccagtatgttgatttgcagttggcaatcgtaatatccacgccagtgaatggatcagtaccggagaggcttgcaaataacgtatcaactaattccatttttattatccggcttaatgcaacattttattcatcggcacataacctacattttccaccaggtttttcccctgtagaattaaaaatatttttttgttttacattctgttcatccctattattgcattttattttgcggtgatagctaaaccgactctgtactggctcaaaaattactgatattccactcgcaatatagccagtgcattataacgacctgccgcaggcacttttccagttgtactaacaggtaaagtcagaaaagtaacatcagcagtttgcgcagaagcagcctagttttccaccaatctgaacggaacgcctactgatgttgccagggcatttaaatctacggagttttgctgactatccataatcataataccaacatcaggattatcttgtgcctgaataatactttgtttcccattggtatcacgtgtggcggaaatgttaccgtcgaataccaacgtcattaccgcatctgtatctttattcgtacaattaatcggaatagttgttgctacaggagtaacaccagcgggcttcgctccggcaccagcccggctcaattcactggcccacacatccggcatattaacagtaaaactcgtaccctcattaatagtgcaaccttgcggaacctgaatatttaagtttcctatgtaggcattaaagacagggataggaccatgttcggtagggatctggctgacatataatgacaccaataatacgttacttaatgaaacatcagatataatttttttatcaatcctgattttaatatatccttcagtacctgatgcccaattagatggtttgcttctgtcccccggataattggtattataattttcgaatggcacaattttatctgtcattgtgccattttgattataaagttttatatgagtagagacagatatttcatgggtgagtggaataaatacatcactcccttgatgatcaccactggcaccagacggatctattccagagacagcactgaagtaaatttcataatcatcaagagaattacaataagccttataggttccaaccttccagatttgtgatggcaatacagtgccaggcgcatttttgttgacatcagaaaccactatagtaccaaaattataagaaaaggatgcaggcgtagtattattactcggtgaacccggataacaatatgcacgttctcgccccatatcttcagcattagcaatagaagaaagaacatttgaaaatataataatcaataaaatgaaatatcttctataccaataagtatgtatacgcatatcatgtcctcagatatattattgactaaatgcaaagccagtaacatccaactgtgaaggatttaattttactttcaaaattggcaatacattattataaatgtccaatgtctgccatgctatttcacaaaccccttgcgatttacaccatgattgttggcgatggctaaatggtgcgaccataccaccatctataactttaccatcaacatgtaggttatagagtgtcacatatctggggcctggattataaacggtaacaatttcattttttcgtgcccagcgtaatttttgatatgacatattcgggtcttcagacaaatttgatggccgatagaatattttcatacgattgcggactgctatttgcaattgattatcagttttgactgaatgactattttccaacgttggtaatgctgcaacattcagtataaataaactttcccggtcggcaggtaaactgccaccaacacgattaattcttatttttgtatttttgtcaggcttcaaaataaacagtggcggagttgcgataaataccgtttcagaatatgagggcaaagattcaaccgttcccgtcaactgacgagcatcatcaggggagactgcaaccttgactaacatatctctgtctgaagtgtttttgagttcaacagatattgaggactgattttccggatacgcaaaacgcgttccaccgatcactaagcctgcttgtgctgtagagaataaaagggaaaataatactatgactaccttaatcataggtgacaataaacgatactgacgcatttgcatcccctggttggacattattttttaatgctttgtaagccgcaaaaaaatgcaatatattatcaactgatgatgtaagtgaaaaaaccatgcttttaacatcattactaatactgcctttgttcttatcaaaaatcgtaagtgcaagcccctctaccgagccatcttccagcttatataaactggcatcttcagaaactgtattgccggtaaactttatatacgcgttgccaacatcactaccacagcgggttaacgttatggaaaaataaaccttttcagtaacatcccctgcactccttaccgaactactgggtacgtctggcatattaactgtaaaattttttgactcatcagaaataatgcaggttttttcggtaattaacccttcaatacgaaccactccggcatgagtgatatcatcagcaaaagaatttgttgatattataaacaaaaataaactaatgaatatcttcatatctccctcactgataatcgatatcaaaatacaacagagcatttgcttgcccggcatgtacattttcctgagttgatttatagcgaagtttaaacgtcaaattagcatcaccgttttcatttaacactaaatcacgaaaacctgattcaccattaatggcaatcgccacatcattgttatccaatatttctattcccagtccagtcgcactatctgcaccggcggagagacgcagtaatgcgctattaatggcatctgcatcaccagtaaaccgcacattggcgctcacaccagaactataaacagtactttttgcagtcgggcatccttgtacattaatcgtaaacgtttgactcggagaaacatcacctacatttaaaaattcaattagcatcataagtgcccatttttaccgactgatctttacttccggtagtaatgtcacaagctttttgccaacaaaatcccagtaaatgtaacaacaactgaatcattggcctgccctgagagcggaaaagcaaaaaaagcgaaaaaaataaaaaatacagaatatttagagaatattaaattcattagcggcactccagagttgcatagctaacaggattatccagttctgtttcagggagcttgtaattagcctgacatttttgctgaacaccgtctccccactggatattaataacaccttctaaaggcaatcctgagagataaagttgtccattatcgccgacaatcccggtaatttgactactgtttttaatctgagcgctggctgtagcaccgaatgggactgatttattacgataacgaactgtgaacaaaccacgaataccgatatgagcagcaaactctgcacgaactaacgcaccttttcccggaataacttcagtggaagtgatatccagttcagtatgcatattcattgacataggatctaatgaaatattattacgtctatattctgttgcataaggaacaactgcatatccacgccagtcagtggatattcctgtcccccgctgaacatccacattattcgctccaggcgcttttatcaaaacattagtttcacctaatggttgactcaacgtaagaccattttcatgtacaacaagagcaccactgatgccatagtttatttgttgattaccttcattatcgtaactgtaggcggaattcaaggaaccatatgccccacgataattaacaccaacagaaccactactgctattatcctgattagcaaaaccatgttgtatgttataactgagattatgctgctccaacagagaaccagatacccccgtatattggtttacctgtccgtggttatcctgactataaccatacgttgcagtcatggcattcgatgatgagcgcccatcattcgtggaagataaccaattacttataggtaatgagacatttagcgagacaattttatccgcatttgtccctggtgatttactgtaattccacgcaacatttagatagatacccttaatactggtgttataaccaacttggtataaagaatcttttttatcagtattccagtatgtttgctgactagccgataaatacatagacccgtagttaccgaaaggttgcgatacactagcctgaaattttccacgtttgctataacgcaagttataaaaatcattccagttataaacgtaatctttatcatctaacgtttttggatcaacaacagtccctgacatttgttggtatgtcgtatcacttaaagtgtaaaagccctgggttgaataacgatagccaataatatggaatgctgttcctgtctgaactaacgatttggaataaagaaaacgataagattgcccttgatgtttgctcccatccacaagcgaactgttagcctgagtaacatcaaacgatgttgcaccaaatacacccagattcaggccaaggccgagcgccaacgcccggtaatcctcagagaattgtgccccaccataagccgtaatatcccagggtaaaccccaaattaattccccctgaaatacataaggacttttctggttatagctattgcttcgatattggccaaccgtagtagaatattttaaatgaccttctcgttgcaggatggggacagcggcataaggtacggtatagacagtttctgaattatcagactctttgatggtaacttccagatctcccgcagatgatgtcgggttaagatcgctaatctcaaacggtcccggcggcatataggtttgataaatgacataaccattctgtttgattgttacctgagcgcgacttttcgcaattccgcgcaccgtgggagcgaaaccactttgactatcgggcaacatattttcgtcagattccagttttatgccacgaatactaacactgtcgaaaacatctgatgatgaccatgtatctcctagcgttaattcacttctgaaaggaataataacgcgctgcaacgtactactgatatgctccagtttacctgctgaattactcccacgactccaggttgaataatcgcgaaaacgccatgcaccaatattgatcccagcgcgaagatttaaataatagttatttgaagagtaatcaccacgatcgttattaccagaaaagtcataattcagcaaaaaagctgtaataccgttatcccactgttctggtggaatatatccgcgagcgtcacgttttattatcgcctgtggaaaggtcagtttaagtctctgtgcatccagctccggcatgtaatgcacatcgggaaaccagatacgcaaatcaaggcaactattttcagatgaagccaaagcctgctctggcagcgcatttttgttaattccaaggcttaataagtcagcaagtgaaaggcagggaatcagttgattctcatcgtctgctttaaaagttacagtacgagagagtaaaggggaatcattgacccaaacttcgacttcatagctaccaggaagataagtcatccctttctcgaagcgggataagtcagcaacagcttcagtatcacccgacagaaaagcagggttaaagcgcattcccgcgattgaacatgcaggcataataaccagaagaagcggcacaacccgtttcatctgcttttgtgccgccatccaatattcgcatcttttgagctttaggttcatatccctgacctgtgttgcatctgaactattccgttgttactgcattattcctttctgccgctccgtcgtagcgccaaagtcattaattgtttgataagtaatttcaccagccaacgtcactggcgacgagaccgtaatatcacttttcggtggtacaaacatattgggcaatttactcccttgtactttaattcctgtcagtgtcaggtaataaggcgaaggattgataacttttagttgtttgccctcatacttaaaccgcaacatatttcgtgcttttcctggttgcacaggtagattttccgggcgataaaatagcttgattttgttttgtaatgccaactgtaaggtattcttctgtgtatttttctcatctgttggcggaattgctttaacattcatccaatacaaagtttcacgatcggtcggcaaattagtcttaccaagaaacatgatacgtaatgaagcttctttacgcgttggtaacataaagaggggaggagtgataacaaaatcctggctctttttttccgttttactgtcatcaacccatgattgaattaaataactggtgttgtcaccgctattttgcacactgagtgttatttgcttactttctgccggataaatcaatcgcgttacgccaaggccaaacccgcccgcggacgcattattaataaataatatcgatagtaaaaaaagaatccctgagcgtataatattttgtgatacttttaattcatccctgaatccacaaacccattttttatttccaataatacatttcatacagcatccttgttgatgaaataacatctgttattcatactctattaaataatttcaatctcaggttacaactttttgtaacctgaaatcgtatttatatttactcgtacagcacaacaaaacttgctgttgacttaactacacctggtgcaacagtgctaccgttttgagcataacctgcagtaaaggccgcgctgaaatcatgggtcgtagcatttcctggaattgtataagcggcggtggaggcgctaccctctgccgcagtggtattcaggttaatcagaccattattcgtcgtacctttggagtaaattcgaatccctacaccagtcgcccccgcattgccgctgttgtcagcatccgttgatccttctacttcgttagcgagcgttttattagcgctatctgcagtaccggtaaaacggaactcaattttctgatcatctgtattgctacattcggtcagattaatattgaaatcggtctggttgctcgccccctgtgcttctacgtcgataccagtgaaaaggttggaaggcacaaccggcaggacaacttcaatctgttttgaatcggttgcgaccttacaggtagctttcactacacggccagtaaagcggattttcccccccattgaatcaacgttgtcatccatatcagtgagcctgggataatcaacggtgctccagtcagtatccgccccaccaaattgtgttgcatcgccgggtgctgcggttaccgcagtagacatcagcatacctgatgccagtaatactgcggataaattagataaattgaatttcatttatacctttccttttgttaaaaaatccaagcaacattggtgtttttacattctgcgttaataagttatatctcacaaaaaaaaataagctgacgttggctaattccagaaggttctttagaagagtaattgagtgaataatattatatatgctgcttagtaatgtacctaaaataatccaaagccgcaataagtgagtttatactcacatataacacactgataatgataaaatttatttttacgtggagttgtaagaggggcaataaaacataaatcacatgaataatattaatgcattcataataaattaatattatttgaaataacaaaataccaaaaacattatcatcaatcgttatttaatatatattaatggtatatattaaatagaataacatacatcaaagttattgtttattgtgtatagaaataccgtgagttccactctgtattacttcagcggaacacacggtatttagccgtatt

SEQ ID NO: 168 - DNA, 3484 bp, Escherichia coli
ggttcaaacaggtgttgcacacaaccagacgcggcacctgttttattacctgaactgataatgaccttcacccaatcggataacccttccctcttcttctgcgcggttcagccacacactaatttgttcgatggttaaaccagtacaagacgccagcctttcaatacttatcgattcctttgcaaggatcgccagttccgccacaaagagttgataaaaatcgacaggggtatgcgcgggcattactgcgtaatttgcgtcatcttcgtgcagcgaaaacagttctggttgagcgttacggagtgctctgtcatacatcagcccaggaacgtctggcagtctgatcgtcacattctcagcctgttcagcactccatgacgccccattttctactaatcgtgaattggctgattgcatatcctgatttggtttaacctgcatgggcagccactgatgttttaatgcctccatcgccccggttatcgttccaccggtcattcccgcacgtacaaccattgcgctttcagcaaggcaataaatatatttattccgcgccatcgcattgccgacggtgaaacgtacctctgggtaaaacggcgaaatcaacaccaggttgcctgctataagcccttcacgccatttcactaacgtactcgtttttaacaagctatcagctaatacgccaacggcagttcccccgacctccagagccgaggccattgcacattcatcaatacctcgcgcaccaccagagataacgcaaatcccctgttgggccagtttcgcggccagttgttgggtatagcgcaaatcgtcagtcggagcatctcgcgagccaacaatcgccataccttccgcttgcagtaatgctttattcccgcagccaaataaaacgggaggtgcatccgttcgcaatcggtttttcaagcgaacgggataatcggcatctccgcgggttaagatccataaaccggcgcgttgccacttatctaccgccaacgccagactatgaccacgcgccagcaagccaagaatacgctcctgagaaatacgcggatcgctccagcctgtaagtttctcttgcggttgcggcaccagaagctcggcgggactgatacgttggtgcttcagccataatgcaaacttcccccattcactattactaagaggtttatactcactcgccgccgcgcgagaaaaatcgctggttagcaggagagttgcttgtgcattggctgaaagattcatcaattttttaccgaggtagaagcaagggcaagaggataaaccgtcgggcaacctgcctggcgtaacagtgctgtcagaactgtcagcgtccatgcagaatccacgatatcgtcaaccagcaacgccggacctggcatcaaaggaggggtaatcacaaacgccccgtcgagattttgacactggtgaaaacggttttgctgcattttctgcggtggattgtccacgactttttcaatggcatcaataaaaggtaagccaagtttcgccgccagtcgccgggcaaaatcaggaaccaggtcgaggtgccttaatgaaggaacgcagcatacccaggtgggttcaggatgcggattccagcgttggcgaaccatttccgcacatgcctccaccagctcatcactgaagcgccccgtttttttctcctgggctacctgctttccccacccggaatctccccaacgagaaaggattcgccccgtagatccttgtaaacccgcaggcaagttccctttaaatccgtattgcgtaaaagccccagatgccacctgtttattgagatttaatggcaggtcagcgtgtttaataaataaatttgccgcatggagtaagccgctatcaatgtcgggcgacaacagcggatgctgaagacaactgctacatttaccacaacgttcggcacttggctcatcgagtgcgcggcgcagaaattgcattttgcactctttggtcgtgatatagctttcaacgtctgccaactcactttttctctgattcatcaaatggttaattcgttcatgatcaggagaaaaactgacgatagttctgcgccataatttctcggtatacaccacaggcgatggattttcagctaccaataatttcagtgctttttctatttgcccataacgaagattcgtccgttgttcaatgcctcgtagggtaagaccgtcattctcgctaagtacgttgagtatttcatgaatttgcgcctccgcaggaaaggcgctttcacggaagaattgatgaatagcgcggtcttcaccaccacaaagcaatatgccaactgcggaatctatagcacgcccggcacgccccacctgttggtagtaaccgacaatagaccccggcatctgataatgaatgacgaaacctaaatcaggtttatcaaatcccatacctaatgccgtcgtcgcgaccagcactttgattttatttgccagcagtgcctgctccagatactccctggcagtattagaatcttccgcaccttcacaagtcacgccgctgtaataagcaaatgcactgataccatttttccttaaccactcggcgacaagttcagcatcgcgagtcgtcagggtataaacaattcccgatttggaaaactgagggataaccgttgctaaccatgccagacgggatgactgttctcctaagactaaggcatcaagcgccaaactttcgcgagccagcgttccacgctgaatcacaatgtcacccaattgctgacggatatcctcaacgacacggttattcgctgtcgcggttgtacccagaataggggtattcgcaggcagttggcgcaaaatatctaatatacgtcggtaatccgggcggaaatcgtggccccaatcagagatgcagtgcgcctcatcgaccaccagtaaaccgatgcggtcagcgactggatataaaaccgtttcaagaaaatcctgattcgccaaccgttcaggtgaaatcagcagacaatctacgccaccttgcagcaacttatcgctaatgcgctgccattcttccctgtttgtagaattcaacgtttcagccgtaatacctaaccgttcagcggcggcaacctggttacgcatcagggcaagcaaaggagagatgataattgtcgggccagcgccgtgatcgcggaagattttactggcgatgaagtacacggcacttttcccccagccggtgcgctgtacaaccagtagttttcgccgctgattaaccaccgcatctatagcttcccattgcccttccctgaaagtagcgctggtgttacttaacatccgctgtaacagcaattcagctccgtgtttctccatcatcttctccctcgtccgttaacgcagtgattagaacggataatgttccggtctttttgcgagagagatcaaaaaaatgaagacaggagaaaagagaaatgaattactgcgagcaagctcgcagtaatttgtcgcagtaa

SEQ ID NO: 169 - DNA, 179 bp, Escherichia coli
agaggctatcagtctacggtccaacaatgccggatgcggcgtgaacaccttatccggcctacacagagcatcgaactcgtaggcatgataagacgcgacagcgtcgcatcaggcattgtgcaccgtatcgccagatgcagcttgaacgccttatccggcctacaaaccggtttcaagca

SEQ ID NO: 170 - DNA, 5821 bp, Escherichia coli
  misc_feature (4645)..(4645): Unsure
aacacctaccaacgcgccgttatttcctgacggcgcagtaaacttctgacaaatatcgactcacgtcacatttttttgatcacgatttggtccctcaaaatgtgagacgcttcgatcctctttttctcccgttcacctactatacgcttgaagttgtccatgattgtccatagacaactgtaaatgttcaggtgcgcgccatgaaatcattaagtaagtcgtcacaaataccgctctatcaacaagtggtggagtggataagagaaagtatttataccggggatctggtggaagacgatcgcattccttcggaataccagattatggatatgctggaagtgagccggggaaccgttaaaaaagcggtcgcccaactggtaaaagaaggcgtgttgatacaggtccaggggaagggaacatttgtcaaaaaagagaacgtggcatatccgttaggtgaaggattattgtcattcgcggaatcgctggaaagccagaaaatacactttaccactgaagttattacgtcacggattgaaccggctaatcgttatgtggcagagaaattaagaataacgcccggtcaggatattctttaccttgagcgtttacgttcaattggtgatgaaaaagcgatgctgatagagaaccgtatcaatattgagctatgccccggcatcgtggaaatcgattttaatcaacacaatttatttccaacaatagaaagtttgtcgaaaagaaaaattcgttactcggaaagtcgctatgccgcgcgattaattggtaatgaacgcggtcattttttagatatcagtgaagatgcacccgttttgcatctggagcaattagtctttttctcccgagagttacccgttgagtttggcaacgtctggttaaaaggaaataaatattatctgggcaccgtgctgcaacggcgggaattgagttaaatacacttttttatgaggaataaaatgcaaggcatacagtttcaggaaaattatattcaacgacttccggcagggttaagcgttgaacagatcatccgtcagttagcgcaaccgttggttgctgctgagctggtggtccctgattttgccgatcacgtactgaaacgtgaagcgacgtacccaacggggctgcctaccgaaccgccgtgcgtcgccattccgcacacggaccataaacatgtcaggcacaatgcaattgccgtcggtattttgccagagccggtagagtttgccgatatgggcggcgaccctgatcccgtgcctgtcagggtgatttttttgctcgccttaagcgaaagtaacaaacaattaaatgccctgggctggattatggagatgattcaggatacgccctttatgcaagccttgcttacaatggaaacaacaaaaatacacacagtaatcttaaacaaaatgaatgaacgaggtgaaatatgagtcaaaccattttatttgtctgcgccacgggtattgacacatccacggcggtaacagaaaaagtcatggagtattgcaaagagcacggccttaacgtcaattattcccaaaccaacgttgcctctttacccggtaataccgacggcgtagcgctggttgtttcaacgactaaagtgccttatgaactcgacgtgccggtggttaacggcttacccattattaccggtattggcgaagagaaagtactggcgcaaattgtttcgatccttaaaaagtaattaataataattaatttcaacccactccatcaggcgctaacgcgaggtgcgctctcgcctgaaaaagaggtttattatgaacgatatcgcgcataccctctataatattgtgcaatatatattgggatttggtcccacggtaatgttgccgttggtgttatttattcttgctctcttttttaaagtaaaacccgctaaagccttacgttcgtcattaacggtcggcattggttttgtcggtatttatgccattttcgatattcttaccagcaatgtcgggccagcggcccaggcgatggttgaacgcaccggaattaatttaccggtggtggatttaggctggccgccgctttccgctattacatggggttcgccaattgccccgtttgttattcccctgactattctgattaacgtggcgatgctggcgttaaataaaacccgcaccgttgacgtagatatgtggaactactggcattttgcccttgccggtacgctggtttattacagcaccggcagcctgttctttggtttgctggcagcggcgattgctgcggtggtagtacttaaactcgccgactggtctgcgccactggtacaaaaatactttggcctggaagggatctctttgccgacgctctcttcggtggtgttctttccggtcggtctgttggtcgacaaaatcatcgaccatatccccggcctcaatcgtattcatatcgacccggaaaccgtacagaaaaagtttggcatcttcggcgaaccgatgatggttggcactattctgggcattctgctcggcgtaattgccggatacgatttcaaaaaagtcttgctgcttggcatcagcattggcggtgtgatgttcatcctgccacgcatggtacgcatcctgatggaaggtttattaccgctgtctgaagccattaaaaagtatctcaatgccaaataccctgaccgtgacgatctctatatcggcctggatatcgccgttgccgtaggtaacccggcgattatctccaccgccctgctgctgacgccaatctcggtctttatcgcgtttgtcctcccaggtaatgaagtcctgccgcttggtgaccttgccaacctggcggtaatggcgtcgatgattgctttagccagccgtggcaatattttccgcaccgttctggcggcgatcccggtgattattgccgacctgtggattgcgactaaaatcgcaccgtttattaccggcatggcgaaagacgttaacttcaaatttgccgaaggctccagcggccaggtttccagtttccttgatggcggtaacccgttccgcttctggctgctggaaatcttcaacggcaatatcatcgccattggtctggtgccggttatcgccctggtactgtatggcattttccgaatgacgcggagcacggtttatgcctgataacagcgcagctatcgttatcgatattggcaccaccaattgcaaagtcacctgcttttcctgcctggacgcaacgacgttgggcgcgcataaattcgtgacggcaaagcagatctccccacagggcgatgtcgatttcgatatcgacgccctctggcaggaggtccgccaggcgatagcgcaactgaacgccgcttcgccgctgccggtcaggcggataagcattgccagttttggcgagtcaggggtgtttcttgacgaacatggcgagatcctgacgccaatgctggcatggtatgaccgtcgcggtgaagagtatctggcaacgcttagcgaggcagacagtgcggcactttatgacatttgcgggttaccactgcacagcaattactctgccttcaaaatgcgttggttgctggagcattatccgctgcgcaatcgtcgcggcctgcgctggctacatgcaccggaagtgctgctctggcggctgactggcgaacagcgaacggatatcaccttagccagccgtacactgtgcctggacgtgcgcaaaggcgaatggtcagcgaaagcggcggcgttgttacacgttccctgttcagcatttgcgccattggtgcagccaggcgaacacgccggatgggtcagtgagtcgctctgtaaaacgcttgggttctcgcaatcggtcagcgtgacgctggccggacatgaccatatggtgggtgcgcgggcgttgcagatgatgccgggcgatatccttaactcgacgggcaccacggaaggcattctgcaactggatacacaaccgacgctggatgaacaggccaaacgtgacaagctggcaaacggctgttactcgcttgccaaccagttcaccctgtttgcttctctgcccgtgggcggtttcgcgctggagtggctgcgtaacacgttccggctaaccgatgaggagatcgccgtgtcgctcaatcgtgggtatgcggattatctggcggggaactggtcgcttgatgacattcccgtttttattccgcatcttcgcggttcgggttcgccctataaaaatcgccatacccgaggattattttatgggcttggcgatacgttaaatatcgatatgttaattgccagcgtctcactgggattaaccatggaatttgccaactgcttcgcctgttttaatgtgcccggcaccagcgcgttaaaagtgataggtccggcaacccataatcccctttggctgcaattaaaggcggatattttacagcgtccggttgaagcaattgcatttaacgaggcggtttctgtcggagcattattaaccgccgcaccggatattccaccgccgcaagtcaccatagccaacgtttgttaccgaatcgggcgagataccatcaattacagcgttatcagcacaaatggaaaagctggtatcagttgaaattacagcaagaaggcgtgatgccattacatcatcgggaggagcnctatgttgagtaaaaccgtggaagtcagaaacagtactggcctgcatgcacgtccggcggcctgtctggcgaaagccgccaaaaaatatagctgtaaagtgacgctgcactatgaaggtaatgatattaatgccaccagcatgatgaatattatgcgcgccggaataaaaggcggaaaaacggtggaaatacgctgcgaaggtgatgatgaaaacgaggcaatacaaactctcactaccttatttcgcgaccgcttcggtgaagctgaataattaactgatattaaaagatgaggttttcaatatgccattagttaatggacggatactgctcgaccgcattcaggaaaaacgggtattagcgggcgcatttaataccaccaatctggagacaacgatttcaattttaaacgccattgagcgttcaggattacccaacttcattcagattgcgcccaccaatgcacaactgtcgggatacgattacatttatgaaatcgtgaaacgtcacgctgataaaatggatgttccggtcagtcttcatcttgatcacgggaaaactcaggaggatgttaaacaggcggtgcgcgcgggctttacctcggtcatgattgacggtgccgcattctcttttgaagagaatatcgctttcacccaggaagctgtcgatttctgtaaatcctatggcgtaccggttgaagcggagctgggggcgattctcggcaaagaagacgatcacgtcagcgaagccgattgcaaaacggaaccggaaaaggtgaagacctttgtcgaacgcaccggttgcgacatgctggcagtttctattggtaacgttcatggcctggacgatataccgcggatcgatatccccctgctgaagcgcattgccgaagtcagcccggtgccgctggttattcacggcggctccggtatcgccccggagatattacgcagtttcgttaattatcgcgtcgctaaagtgaatatcgccagcgatctgcgcaaagcgtttatcaccgcagtcggcaaagcgtatgtgaataatcacaacgaggcgaatctggcacgggtgatggcatcagcaaaaaacgccgtcgaggaagatgtgtatagcaaaatcctgatgatgaatgaggggcatcggttgggtaagtaaatcttcgccggatgcggcgtg

SEQ ID NO: 171 - DNA, 1647 bp, Escherichia coli
tactaacagttatattcatgttgtctatttgattgccatcaacttgtgatacatcgcgatgttcttccgttcgctggtgttttttccaaaaatattctgtacaggttcacagattctgttgcacaggtttccgtaacagggaaacctgatgactatcacatagcgttattatcgcctgatatgcgaataaataccgaatataaaataatttattctgaaaagatgatagatgataaaggctcgtgggtttaataaaatatttcctaaaagactcatttaaaacaacaaaataagataaagatattaattcagagtttatcttaggataaatatttatttaatagcattaactcaccgctaaaagttgatccccataacgctaaatccgattatagtgaagttactttttttaattgatggcatcttatagacatatttaactaactgaaaagacgaatcatatgtttttcgaagtgtagcagaaaatatatatggggtttaaaatgaatatatatatcggatggttgtttaaattaattcctttactgatgggtataatatgcatcgcattaggtgagtttgtattaaccggttctgggcaaagtgaatatttcgttgcagggcatgttctgatttctctttctgcgatatgtctggcattgttcactaccgcatttattattatatctcagttaactcacggcatgaataaattctacaacaggttatttcctgttattggttatgccggttctgctacaactatgatttggggatggtcactgttggcaagcaataatgtgatggcagatgaatttgtcgccggtcatgttattttcggcgttggcatgattgccgcttgtgtatcaaccgtagcggcatcttccggacattttctgttgatccccaaaaacgcctcgggcagtaagagtgacggtacgccattgcaggcctattcttcaacaatcggtgattgcttaattgccgttcccgttctgcttactctctttggtttcatttggtcagtcgtactgttacgtagtgcagatatcacaccacattatgttgcaggtcacgtactaatggggttaacggcaatttgcgcttgtcttattggccttgtcgccactattgtccatcaaacgcggaatacgttctcagtgaaagaacattggctgtggtgctattgggttattttgcttggctcacttaccattatttttggtatctacgtattaatcagttcagatgcaagcgcccgcctggcccccggcattattctcatttgcctggggatgatctgctacagtattttctccaaagtgtggttgttagcgctggtatggcgacgcacatgttcgttagccaacagaatacccatgattccggtatttacctgtctgttttgtctgttccttgctgcgttcctggctgaaattgcgcaaaccgatatggcttactttattccttcgcgagttctggtgggcttaggtgcagtttgttttacactgttttccatcgtttctatattagaagcgggttcagcgaaaaaataataaaaaaggcttcagataaggcgttgggcgccttatctggttttattcaggttaatccctctggtatcgagagcgcattttgcttcttatt

SEQ ID NO: 172 - DNA, 9054 bp, Escherichia coli
cgattgaacaatataaagaggcccagcaacagccagacctcccgttaattatacgttatgcagtaacgccttccggtatcaacgaagcaatttgcttacgccattgcgcttgctcctgttcaccttctgtacgttgaccataaagttgcgctatctgcgtaccatcatgggcaaacaattccaggctggttacgtggccatcgctggtcggtttacgggtaacccaggcttcagcaatgctctcttctaatagatgaagggtaaacgtcgggttgaaaatattcagccaacctttcattggcaccactttttctaccacaccggtgaaaatctgtacgcagccacggttgccaacaaacaccatgatttcattgccatcctgctgtgcagattcaagaatttgcgccaacgcactgttggatactttgcaggccaaatcgtctgccaccagattgaacgcctgttggcgcgtcaggttgtggcgcttgagcaacgtaaaaaactgatgaacgtcggtcatcgcccgccactcttgctcgaccacactggcatcggctcgcgtttgaacaactggcgcatcaacggcttttaactcaagcggcgtattctcatcggtgataaaccgtgccagaagctcactccatgccgccatatcggtattgtcggtggcataaacttttagtaatgcatcgccctgatgatcaaagaactgaatactctggcgttcgccacgagccgtgttttctttgatgtggaaaacactggcccattgattgagaaacagacgtaaatccagcgcgcgcggattgaggatcaatccggcatgtccgttcaaatgctggtttgtgaacgcaccaacttgttcatggactgcgtattcattacggcaaatacatttggtctcgccaacactttcgagcgccgccagaatttcacgaatatcgccgcgcatccgccacgcgtcgtgcgtgacgcgtgcaaatgccagttctgcttcgctgatattcattaaacctgcgatgtcacgcgcgtactttccgggattttgttcttttaactcaagccagcgtgtgtagtggttcattgtctctcttccttccagataaatgccccgaaatatcggggcagatgattaccattgataactcacgaaaatttttccgttacgaccatcctgtgggatgccttgcggcgaccagtactctttatcgaaggcgttgcccaataccagagtagtggtcatgcctttgagcgcctgctgcccttgataactgacgtagaaatcattcacaccatagccaggttgtttgctgtagctgctgctgatatgtgttgagcgatcggcaaacgtaccgacccaaccaacagagaagccgctgtgagcgatcggaatattcagggtactggtaacggtatccgggttaatgctggagatatattccccggtatcggtgtctttgccgcgggtacggttataggccacatcaaggctaaacagatcagtggtatatttcgtcatcacatcccagccccagattttggcgttcgggacgttatacgacatagttgtcgccgccgcgaaatcgacggtcgtggagatataatctttcgctttggtatcaaagtagctggctttaaattccagagcatcattggacaacatcaggtcatcaaaacgcagcccaaaaccgtactcctgagtttcgttagtttccggacgtaagttcgggtttggcacccaatagttggtatagaagcgaccaatcgagaagtgtttagaatcgttatacatttcgcccatcgtcggggcgcggaatgcctgagcatatgagccaaataacatcagccagttggtcgggttgatagtcatccccgcacgagatgaccatttgtcggcatcaacatctttgtagccgtcgctgctaccgcgataactgtcatagcgggttccgccaagcagggtaatcggcagatcgcgtaaggtgatctcatcttgtagccaaccagagctaaaatcgatttttgcttgcgggaagcccgtcgtcgcgccacccggatgttgttcctgacgataatactcaccgccatatgtcagtaagtgagaagcgaaactgtcggcaaatagagtggaacggttctccagccttgctccttttgttatctgttcacgatactcgcctgaactccccgtgttttgcgcattaatacggacttccgaccagtaaatttttgcatctgcatttaaccagtcgttaccctgcggggcgagtttataagaaagctgcgcatcgcgttgaattgttgaacgatcgaccatcgggttgctgctatcagaagcttcaacggtctgcggattttttggttcacgcgcgtcgttgttgtagtaacgcactaaaccgctcagagactgggctgaatcaatttgccaggtccctttcgccagcatgttattaatggactcgtcattcggcgcggtttcaccattgctctggcgtaaatcaccccgatcgcgactggaccaggccacaataccatccagattttcagttcgcccaaacgcgctcgcgcctaatcccaggctatggtcccccgtgccgccagtaccaaagacacgaaaaccactgctttgtccttcctgcaataaatcttttgcatcgaccgtatcgtaggagatcactccacccagcgcgccactgccatacagtaatgctgaaggtccgcgaacaatctcaacacgcttgatcagcgccggatcgagaaaagtgccattcaggtgtccggtatccgttccctggcgaacaccatcgacaagaaccagcacgccgcgatgatcatagccacgcatatttacatcctgaccgttggttcgtccggtaccatcaagagtaattccaggaacatgacgcagcaaatcagtggctgaagtagcagtttgattttcaggagcggaagtgtcgataacgctgaccatcataggcgcttcgaaggaactacgtgcattccccgttgccgtaacggtcatggtttcagtagcaaaagcaaacgttggcaaggtggcagaaacagccaaagccaacaaactcaaacgcaacgaggtaaattgcggacgtgacatagcgattctccatgaggaaaataaaaaatgctggctgcctgggttaataccggggtggctggcgaaaaataaatttatttacaattcaaatgattagatatcaccacgggaagctattagcgtatatatcccgtaaaattgccgaatatttctgataattcagcaaaagcacgccctctttgtcaggcaaagtagtacgccacgtctgaagtgaagagtgctgtgcgttttcccttacaaaagatatgattttgttatccatgatgtcatattttgttaaactcaaacgtgataatgagaattattatcgatcaattttttatgatcaagctttttttaaccgccattaacacaataaacagggggttatgaaatctatccagcatccagaaaaccatcctgtgtttatggctatccccccacaacctcatcacaaaacgttgtcgttaacagtgataattttctcttctctttgctctgcaagccgcgatatctccgggttctcagctttttcccgcgctgaaatttaatcggtaacaagaacattagctgacgaagcatcttgataaaaatcaaaaataaatacgcttgtaacgccgtgcgtattgaatcgacggttgtatttcatatataactcaaatgataatcatgatcattctcaatttgataagagttctcacattatgccaaggatcatcaccaggccgtttcttttttccccactaacgttatgtatttcagccgtggtctctgccgcgaagaccatggtaaaacgaaaaaaattgtttacggcattactggctcttagctggacttttagcgtaacggctgccgaacgtatcgtggtcgcaggaggatcgctgacggagttaatctacgcgatgggcgctggcaaacgcgtggttggtgtcgatgaaacgacatcttatccaccagaaaccgccaaactgccgcatattggttactggaaacaactcagcagcgaaggcattttgtcacttcgcccggatagcgtaattacctggcaggatgcaggaccgcaaattgtgctcgaccaactgcgggcgcaaaaagtcaacgtcgtcactctgccgcgtgtaccagccacccttgagcagatgtacgccaacattcgccaactggcaaaaacgttacaggttcctgaacaaggcgaggcgctggtgacacagatcaaccaacgcctggagcgagtacagcaaaacgtggcggccaaaaaagccccggttaaagccatgtttattctctccgcaggcggaagtgcgccacaggttgccggtaaaggcagcgtcgcggacgccattctttcgcttgccggagcagaaaacgtcgctacccaccagcagtacaaaagctacagcgcggaatcgctgattgcggctaaccctgaagtgattgtcgtcacctcacaaatggtcgatggcgatattaatcggctacgttctattgccggaattacccacactgccgcatggaaaaaccagcgcattatcaccgttgatcaaaacctgattctgggaatgggtccgcgtattgctgatgtcgttgagtctttacaccagcagctttggccgcaataaatggatttaaatcagacgaatgaacacaaataacaccctggatctcacgccacattttgctttagacggtgatcagccctttaaagacaggcgcgccatgatgccgtttcgtggggccattccggttgccaaagagcaactggcacagacctggcaagagatgatcaatcaaacggtatcaccacgtaagcgactggtttacctacacattcctttttgtgcgacacactgcacgttttgtggtttttatcagaaccgttttaatgacgatgcgtgtgctcattataccgacgccctgattcgtgaaatagaaatggaagcagacagcgtattgcatcagtctgcccccatccacgcggtctatttcggtggcggtacgccttccgcgctttcagcacacgatttggccagaatcatcaccacattacgagaaaagctgccactggcccctgattgtgaaatcactattgaaggccgggtactgaattttgacgctgagcgaatcgatgcttgccttgatgctggagcaaaccgcttctcaattggtattcagtcgtttaacagcaaaatccgcaagaaaatggcccgcacctcggatggcccaaccgctattgcgtttatggaaagcctggtcaaacgcgaccgtgccgcggtggtctgtgacctgctgtttggtctgccgggtcaggatgcgcaaacctggggagaagatctggctattgcccgcgatatcggtctcgacggcgtcgatctctatgcgctcaatgtcctgcccaatacaccgctgggcaaagccgtggaaaatgggcgtactaccgtgccctctccggcagaacgtcgcgatctttacctgcaaggatgtgattttatggacgatgccggttggcgctgcatcagtaacagccactggggccgtaccacacgcgaacgcaatctctataacctgctgattaaacaaggtgccgattgtctggcctttggttccggagccggcggttcgattaatgggtactcctggatgaacgaacgcaatcttcagacctggcatgaatccgtcgcggcaggcaaaaaaccgctgatgatgatcatgcgtaacgccgaacgtaatgcgcaatggcgtcataccttgcagtcgggcattgaaacggcgtgtgtaccgctggacgaacttacgccacatgccgaaaaactcgcgccgttactggcccagtggcaccaaaaaggcttaagccgcgatgcgtcaacgtgtctgcggttgaccaatgaaggtcgtttctgggcaagcaacattttgcagtctcttaatgaactgattcaggtacttaatgcgccagcaattgcgcttgaaaaaccataacaggagtgatttatgagccatgtctcgttacaggaatttttgaaaacggagccagacggtacgctggaggcgatcgccgaacaatacaacaccacgctgctggaggtagtgaaaaatctgccctctccgactgttgtgtcaggtgataaattcgatactgtctgggataccgtctgcgaatggggcaacgtcaccacgttagtacatactaccgatgtaatactcgaatttagcggcgaactgccttcgggtttccatcgccacggctatttcaacctacgcggaaagcacggcatgtccgggcatatcaaagcagaaaactgcacgcatattgccttgatcgaacgtaaatttatgggcatggacaccgcctctattctctttttcaataaggaaggcagcgcaatgctgaaaatcttcctcggtagggatgatcatcgtcagctcctgagcgaacaagtcagcgccttccatgctctggcagcatcgttaaaggaacacgcctgatgacaccgtggctactctttggcgcaggcggaaaaggtgtgggtgccagaacgcttgaactggcgctggcggaacaacgtccggtcgttgctgtcattcgtcatgccgatgccgccacgaaactggcgcaacaaggcgtacaggtttttacaggcgacgcctgtgatgccagcgtagtcgcggctgcttgccgcgcagctggcccggatgcgcttatcatctcaacaatgggcggagctcaggattatctggcgcacagaacagtgattgacgaggccgagaaagcaggcatcacacgcatgattctggtgacgtcactgggatgcggcgatagctggccgtttttatcagagcgggcaaaggctgcgtttggtcaggcggtacgggaaaaaacgctggcggaaagctggttgcaaaccagccagcttgattatgccattctccgccctggcggtctgcttgatggtgcggcaacgggcaaagcacaacggatacaaaatcaggagtgtcatggttttattaaccgtgctgatgtcgccgcacatatccatgaactggcaaatgcgccagcacttaaccagcaggtctacagtctgattgaaccggacctgaaaccggcgtgatcccccggcgcggcatgtccgcgccgtaatgtcgtaacggagttttgcgtgctcaaggattcactctcttccgccagggtctttatggggctatcactattattgctagctctggtgctgtttggtgccagtcagggagcgttaaagatcagttttgatgccctttttgatgaggaataccgcgatatctggctcaatattcgtctaccacgggttttgctggcggtgctggtaggtgcagcgttggcaaccgccggggtaattatgcaggggctttttcgcaacccaatggctgaccctggattactcggcgtcagtagcggttctgcattaatggttggcgttgctattgtgctgcccttctccttcccagtggtgctggtgctctatgagcaaatggtgtttgccattgccggaagtttagtggtctgcaccatcatttttctcatcacgcagcgccatcgcgatggcagcatgatgcaattattactcgccggtatcgccatcaatgccctgtgcggcgcagcgatcggcatcctgagctatatcggcgatgagcagcagctacgacaactcacattgtggatgatgggcaatcttggacaggcgcaatggccgacgttattggttgccagttcattcatcctaccggccattatcgcaacaacttgtctcgccggaacgctgaatttactgcagctcggtgatgaagaagcccactacctcggcgtgaacgtgaagcgtaaacgccagcaattactgttagtgagctcactgctcgttggtgctgccgtatcggtaagcggcattatcggctttattggcctggtgatcccgcatctgattcgcatgactaccggggcaaatcaccgctggctaatcccttgttccgccctcgccggagcctgtttattgctgatggcagacacgcttgcccgcacgctggtacagccagcagaaatgcccgtgggattattaaccagcctgcttggtggcccttattttatgtggttgattctgcgcaaccggaggatcacatgatcagcgcccagaatctggtttatagccttcaggggcggcgtctgactgataatgtctcgctgacttttcccggtggggaaattgttgccatcctcgggcctaatggtgcgggaaaatctacgctgcttcgccagctaaccggctatcttcaacctgatagcggcgaatgtcggttgtttaataagccattaaatgaatggtcgattactgaactggcgaaacaccgggccgtgatgcgtcaaaatagccacatggcgtttccattcagcgtacaagaagttatccagatggggcggcatccgcatcgtactggtaatcaggataatgaaacagcacaaataatggcgttatgtgactgtcaggcgttagcaaaccgcgactatcggcaattatccggtggtgaacaacagcgcgtgcaattagcgcgcctgctggtgcaactctgggaacctactccctcaccgaaatggttatttcttgatgaaccaacttcggcgctggatattcaccatcagcagcacttgtttcgtttattacgccagttagttcacgaacggcagttcaatgtttgctgcgtattgcacgatctaaatcttgccgcgcgttatgcagaccgtgttgtattaatgcaaaaaggaaaggttatcgcaaatggtaagccgcaggacgtattgacacagcaggcgctaacaatgctctacggcgcggatattaccgtacttaaagatcctgccaaccattcaccactgatcgtcctcgatcattaaaaccaacaggagtaccgcactggtactcctgcgaataaataactat

SEQ ID NO: 173 - DNA, 1391 bp, Escherichia coli
cctcgctgctttataaaaaatgattactggagcacataatgaaaacgaataatgccggttatattatcggcgcgtatccctgtgcaccttcttttcaccaaagaagtgaagaggaagagaaggatttctggcgacaattatctgagactccagacattttggggctggaacaaccttgcctggaaaattttcacccgctgggcgatcaatggttactccgtcatacgccagagagctggaaatttgtcgtcaccgcagtgatggaaaccatgcgtcgccgcagcgaaaacagcgggtttggtctcgcctccagtgatgaagaacagcgccaggcctgcgtggcgtactatcgccacctgttcaataaaatcaactcattgcaggctaataaagtgctcgcactggagctccaggctgcaccgttagcaacgaatcctaatgttatgcaagcgacggacgcttttgcccgctcattgaaagaaatcgccagttgggactggccgtgcaagctggtgctggaacactgcgacgccatgacatcttcttccccccgaaaaggctttttgcctttagaaaatgtgctggaagttattaccgattatgacatcagcatctgtatcaactgggcgcgctctgccattgaagggcgcaatacaacgctgccgctgacccacacccaaatggcgaaacaagccggaaaactcggcgcgttaatgttctctggtacgacgctaaacggggcatacggcgaatggcaggatttacacgcaccgtttgcaccattctgcgcagaaagcctgatgaccacagatcatgttcgcgagttatttaatgtagcagaatcgtcaacattgcattttgctgggatcaagctactggaaataaatgcgacggctgatgtgcaccatcgcatcgaaatattacgcaacggcattcactctctgaatgaatctcgttaaacagaaccatttatatatcactttgaatatctaattagccgttttctgataattattacgaatattaacaacattagcgcataaaaaatattgcataaccagaaggactcgttatgaaacggatactcgaaggcattcttgcgatcatcatcgcaatactgtcttgtattatttttattaatatcattcttcgatatggattccacacaagtatattatcgattgatgaattatcccgacttttatttgtctggttaacctttattggcgcaatcgttgcttatatggacaacagccatgtgcaggttacttttttagtcgaaaaactctcaccggctaatcaacaacgtgtttcgctgctaacccatacgctcattttattgctgtgtctggggctggcctggggcgctatagaaaaaacagcgcaagact

SEQ ID NO: 174 - DNA, 1523 bp, Escherichia coli
cgggtagtgtgcgacgtacactgcttgctggttattaattcttttctcttgcgcgaatccttctttaacaattgtccgtaaatcggtccgcgccgtattatccgagacgctcagactcacactaatttcagcaactgtgtactctttccccggattggcgagcatcacattcaggagcgttacctggcgcggattcaggcgtttaagcacaccagagctaaacagcacactatcgagttttgcgcttcgttgtgtaatttcatcgatatgctgctgccagttttgcagagcacgtttaatgacacccgcctgatattcaaggaaataagtcagatccataccatctgattcagtgtactggtagctggcggcatatttgaccggtgcagcatgaagcaaactgctgatggaaatatatttaaagacatcgtagcccgatttcagcatataccagtaaaacagcgcccgactggtgcgcccgttgccatcccgaaacggatgttcatgggccagcataaaatgcagaatgcaggcacggaccaacggatgaatatacccttcatggctgtttaaccactggcaaactttttccagccgttccggtaacaatgccgcagcgggcggttgatgcactatattgccatcatagtcggcgatcacaacatcatctgtttcacgaaattctcccggacgatatttcgcgtcattgattccacccataccaatggcatgtaactggcgaataagcgcaggtgtcagcggttctgcgagtaagtgcggaatttccgccatcagccgggcatttcccgcaatcatatgctcgtcttcagtgcgtggcgaccgccctgtttccagcatttttctcgccaccagcgttgtagtattcgcaccttccagctgggagctggtgatcggctcttccaggcgtaactggcttaactcggctccggccccgcgtaaccgttcagtctgatctttcagcgccagcgcggtagcacgtttgtcgacaagctcgcacgcttctgcaatcaccggggtaatgttgaatccggcctgttcacccgcttcattgcaataattaattcgttggatcgccgcgttgcgcgccagacgggtaagcgtccacgccacatcgacgttttctccttttttgatgcggtactgcaactcatcaaaaggcagataacgtcctttttcatcggtaacccggttaaagcgcaggtgggccaggagttcctcacccgataagtgtgataaaggaataagtccgggaggtgatttgatagccatgtgcttatctcaaaaaagcgcaatattgagatagtgtatagcaggaaagagaaactatctcaaaaaaagcaagttttgagatagttgaaaaagcggctgacaactcgccagccgttgtgggaatgatgattacatcgctgcgcgataaatcgccataatttcttcgtgagttgcctgaatcgggttagtaaacccacacgcatctttcagggcattggttgccagcactggaa

SEQ ID NO: 175 - DNA, 204 bp, Escherichia coli
ttgtcggtcggataaggtgtttacgccgcatccggcagtcggtgcacaatgcctgatgcgacgctgacgcgtcttatcaggcctacaggtcggtgccaaacacgtaggccggataaggcgtttacgccgcatccggcagtcggtacacaatgcctgatgcgacgctgacgcgtcttatcaggcctacaggtcggtgccaaacac

SEQ ID NO: 176 - DNA, 6678 bp, Escherichia coli
ttcctttctcgtcgctgtaatcacagcctctcaccatttactcgctcctgctggcacatgcaggagcctgtttcagagatcgaatctttataacgttcttaacattatatattcaactccacctacacttctgagcgatcgtagcaggctaaattctgaaaatcaggtacacattaaagaatgatgtatcaatatcaacaatgaatttccgcatatcaatgctcgaaacataattaattatttaaatttttcaatcagcttcgcaaattccacaataaaacatcactcaactgaatatttacctttccctgccctgtgcctttatccggtgaaacatttgacatcgattgacaccgatcattaaaatccgcgcgattaatattattggctacaaactgaaatcgtttgacatttaataacatattcgcacaaccaattaatacaaaaactctctaacaaatttattttgcggatatgccccattccaatcattcataaaaaaaatgattgtgccgtaattatcaactgtatcgggattatgaaaaggaattcatcctatgaacctaaagaaaacactgttaagcgtgttaatgatattgcaactttgcttattggtagggtgtgactatattgaaaaagcgagtaaggtcgacgatctcgttacacagcaagagttgcaaaaaagcaaaattgaggcgcttgaaaaacaacaagaactcgacaagcgcaagatagaacactttgaaaaacaacaaactaccatcataaacagtaccaaaacgctcgctggtgtggtgaaggcagttaaaaacaaacaggacgaatttgtctttacagaatttaacccggcacaaacccaatactttattttaaataacggctctgttggtttggcagggaaaatactgtctattgacgcagtagaaaacggcagtgttattcgtatttcactggttaacttattaagtgttcctgtatcaaatatgggtttctacgcaacatgggggggagaaaaacccaccgacatcaacgcattagcaaaatggcagcaattgctatttagtaccgcaatgaactcctccctgaaattattaccaggtcaatggcaagacattaatttgacgctaaaaggtgtctcgcccaacaacctcaaatatctgaaattagccatcaacatggcaaatattcagttcgaccgtcttcaacctgctgaatctccacagcggaaaaacaaaaaataaatgcagcttctgcgcttatatcaaggaatagagagcatcaataatgaacaaaatatttaaagttatctggaatccggcaacaggcagttacaccgttgccagcgaaacggcgaagagccgtggtaaaaaaagcgggcgcagtaagctgttaatttctgcactggttgcgggtgggttgttgtcgtcgtttggggcaagtgcagataattacactgggcagccaactgattatggcgatggctcagcaggtgacggctgggttgctatcggtaaaggggcaaaagcaaatacctttatgaacactagtggcgcgagtacagctttaggatatgacgcgatagccgaaggtgagtacagttctgccatcgggtcaaaaacccttgcaactggtggagcatccatggcgttcggggttagtgcaaaagcaatgggtgacagaagtgtcgcgctaggtgcatcgtcagtagcaaatggcgatcgttcgatggcttttggtcgttacgcaaagacgaatggttttacatctcttgctattggggactcctcccttgccgatggtgaaaaaactattgcgttaggaaatacggctaaagcttacgaaattatgagcatcgccctcggtgataatgccaatgcgtcaaaagagtatgcaatggcgctgggagcaagtagcaaagctggcggtgctgatagcctcgcattcggcagaaaatctacagctaatagcactggctcactggcaataggtgctgacagtagcagttcgaacgataacgccatcgcgatagggaacaaaacgcaagccctgggagtgaattcgatggccctgggtaatgcaagtcaggcatctggcgaatccagtattgcattaggtaacaccagtgaagccagcgaacaaaatgcgattgcgctggggcaaggtagcattgcaagcaaagtgaactcaatcgcgttgggaagtaacagtttgtcctcgggagagaatgccatcgcattgggagagggtagtgccgctggtggcagcaacagccttgctttcggtagccagtccagggcaaacggcaatgattctgtcgccatcggtgtaggggctgcagcagcgaccgacaattctgtcgctatcggcgcaggatcgaccacagatgcaagcaatacggtttcagttggcaacagcgcaacaaaacgcaaaattgttaatatggctgctggtgccataagcaacaccagtaccgatgccatcaacggctcacagctttatacgatcagtgattcagtcgccaagcgactcggaggaggcgctactgtaggcagcgatggcaccgtaaccgcagtaagctacgcgttgagaagcggaacctataataacgtgggtgatgctctgtcaggaatcgacaataataccctacaatggaataaaaccgcgggggcgttcagcgccaatcacggtgcaaatgccaccaacaaaatcactaatgttgctaaaggtacggtttctgcaaccagcaccgatgtagtaaacggctctcaattgtacgacctgcagcaggatgctctgttgtggaacggcacagcattcagtgccgcacacggcaccgaagccaccagcaaaatcactaacgtcaccgctggcaacctgactgccggcagcactgacgccgttaacggctctcagctcaaaaccaccaacgacaacgtgacgaccaacaccaccaacatcgccactaacaccaccaatatcaccaacctgactgacgctgttaacggtctcggtgacgactccctgctgtggaacaaagcagctggcgcattcagcgccgcgcacggcaccgaagccaccagcaaaatcaccaacgtcaccgctggcaacctgactgccggtagcactgacgccgttaacggctcccagctcaaaaccaccaacgacaacgtgacgaccaacaccaccaacatcgccactaacaccaccaatatcaccaacctgactgacgctgttaacggtctcggtgacgactccctgctgtggaacaaaacagctggcgcattcagcgccgcgcacggcactgacgccaccagcaagatcaccaacgtcaccgctggcaacctgactgccggcagcactgacgccgttaacggctcccagctcaaaaccaccaacgacaacgtgacgaccaacaccaccaacatcgccactaacaccaccaatatcaccaacctgactgacgctgttaacggtctcggtgacgactccctgctgtggaacaaaacagctggcgcattcagcgccgcgcacggcactgacgccaccagcaagatcaccaatgtcaaagccggtgacctgacagctggcagcactgacgccgttaacggctctcagctcaaaaccaccaacgataacgtgtcgaccaacaccaccaacatcaccaacctgactgacgctgttaacggtctcggtgacgactccctgctgtggaacaaaacagctggcgcattcagcgccgctcacggcactgacgccaccagcaagatcaccaatgtcaaagccggtgacctgacagctggcagcactgacgccgttaacggctcccagctcaaaaccaccaacgataacgtgtcgaccaacaccaccaacatcactaacctgacggattccgttggcgaccttaaggacgattctctgctgtggaacaaagcggctggcgcattcagcgccgcgcacggtaccgaagctaccagcaagatcaccaacttactggctggcaagatatcttctaacagcactgatgccattaatggctcacaactttatggcgtagcggattcatttacgtcatatcttggtggtggtgctgatatcagcgatacgggtgtattaagtgggccaacctacactattggtggtactgactacactaacgtcggtgatgctctggcagccattaacacatcatttagcacatcactcggcgacgccctactttgggatgcaaccgcaggcaaattcagcgccaaacacggcattaataatgctcccagtgtaatcactgatgttgcaaacggtgcagtctcgtccaccagcagcgacgccattaacggttcacaactttatggtgttagtgactacattgccgatgctctgggcgggaatgctgtggtgaacactgacggcagtatcactacaccaacttatgccatcgctggcggcagttacaacaacgtcggtgacgcgctggaagcgatcgataccacgctggatgatgctctgctgtgggatacaacagccaatggcggtaacggtgcatttagcgccgctcacgggaaagataaaactgccagtgtaatcactaacgtcgctaacggtgcagtctctgccaccagcaacgatgccattaatggctcacagctctatagcactaataagtacatcgctgatgcgctgggtggtgatgcagaagtcaacgctgacggtactatcactgcaccgacttacaccattgcaaataccgattacaacaacgtcggtgaagccctggatgcgctcgataataacgcgctgctgtgggatgaagacgcaggtgcctacaacgccagccatgatggcaatgccagcaaaatcaccaacgttgcggctggtgatctctccacaaccagtaccgatgctgttaacggttcccagttaaacgcaaccaatattctggttacgcaaaatagccaaatgattaaccagcttgctggtaacactagcgaaacctacatcgaggaaaacggtgcgggtattaactatgtacgtaccaacgacagcggcttagcgttcaacgatgccagcgcttcaggtattggcgctacagctgtaggttataacgcagttgcctctcatgccagcagtgtagccatcggtcaggacagcatcagcgaagttgatacgggtatcgctctgggtagcagttccgtttccagccgtgtaatagttaaagggactcgtaacaccagcgtatcggaagaaggtgttgtgattggttatgacaccacggatggcgaactgcttggcgcgttgtcgattggtgatgacggtaaatatcgtcaaatcatcaacgtcgcggatggttctgaagcccatgatgcggtcactgttcgccagttgcaaaacgccattggtgcagtcgcaaccacaccaaccaaatactatcacgccaactcaacggctgaagactcactggcagtcggtgaagactcgctggcaatgggcgcgaaaaccatcgttaatggtaatgcgggtattggtatcggcctgaacacgctggttctggctgatgcgatcaacggtattgctatcggttctaacgcacgcgcaaatcatgccgacagcattgcaatgggtaatggttctcagactacccgtggtgcgcagaccaactacactgcctacaacatggatgcaccgcagaactctgtgggtgagttctctgtcggcagtgaagacggtcaacgtcagatcaccaacgtcgcagcaggttcggcggataccgatgcggttaacgtgggtcagttgaaagtaacggacgcgcaggtttcccagaatacccagagcattactaacctgaacactcaggtcactaatctggatactcgcgtgaccaatatcgaaaacggcattggcgatatcgtaaccaccggtagcactaagtacttcaagaccaacaccgatggcgcagatgccaacgcgcagggtaaagacagtgttgcgattggttctggttccattgctgccgctgacaacagcgtcgcactgggcacgggttccgtagcagacgaagaaaacaccatctctgtgggttcttctaccaaccagcgtcgtatcaccaacgttgctgccggtgttaatgccaccgatgcggttaacgtttcgcaactgaagtcttctgaagcaggcggcgttcgctacgacaccaaagctgatggctctatcgactacagcaacatcactctcggtggcggcaatagcggtacgactcgcatcagcaacgtttctgctggcgtgaacaacaacgacgcagtgaactatgcgcagttgaagcaaagtgtgcaggaaacgaagcaatacaccgatcagcgcatggttgagatggataacaaactgtccaaaactgaaagcaagctgagtggtggtatcgcttctgcaatggcaatgaccggtctgccgcaggcttacacgccgggtgccagcatggcctctattggtggcggtacttacaacggtgaatcggctgttgctttaggtgtgtcgatggtgagcgccaatggtcgttgggtctacaaattacaaggtagtaccaatagccagggtgaatactccgccgcactcggtgccggtattcagtggtaatcatccattaacaaatgggtaaacgccacattgcctgatgcgctacgcttatcaggc

SEQ ID NO: 177 - DNA, 61 bp, Escherichia coli
ccagccccctcacttttggtgaatggctgaagccaacgtcatgtagtgatatgatagaagt

SEQ ID NO: 178 - DNA, 6420 bp, Escherichia coli
ggggaatgagttgtctcaattgacagcaaatgctgttaagcaattcattgaagaaaacgctgaaaaagctgccatgatttaaattacaactctttaatagataattttgaaataaaatcagcttccttgctgattttatttcacatattcattacttatctaataaacattggtccgattgtactttaaaataagcacaaagcaatattatggtgacaaacacagcagtcggaaccggtttagaaaagagtattacatcacttaggcctactaccagtagtgaaaaaagcaagattaaaatataaggttctttagcagttcttaaggcatatatgaatattgctgaaaaggctaaaattgttaatgctactccaggaataccacgcgttgataacgtatctatgagatcgttatgcaaatgagaatctacaaagggtaaagcaccacttaatctaggctctttctcttctagttcatgtattttttccgcacgtttttccagtgattgtcctattggagaatatgtttttaaaccaacttcatacattgccagacgggcaccgactgaagttctggtgttatcatgcgaataattaactaaatccctatttaagtcattcattctcgtaagtaatgtatctttaaaagaaaatacacctgctaataatgcaatcgcaataaaacaatataacttataattaattcgcttattaatataactatccattacgattaatagtaacgcaaagaatggaaacactaatatggctgcacgcgtttcagttactataacagcacataagctaagcatgaagttaattgtatataatgttgttttatgtctaaagtcggattttaaaatgagaattgatgccagtaaagaagggaaaaggatgatgtagcctgctgttgtagcgtgggaagctgataatgcaacacggtcgacgtttaaatagaaatgttgccacatggcatgcgcaaaaaaaagtaactgcgttgccaaggatgcgaacagaattagtttcccaaattttattttggttctcatctcatctttagcaaaaagaactaagaaaataaaagcactacacaaggcaatttttccagtttccattgggccacgatatgcattggtataaaccgagcctgaaactttataatgtgaataccagatgatattaacgatacccaaaagacataatgagatgaaaattaacaaagtcggattattagttattgtgttttttggtgtcgctagaaaatataatgcagatataattccagctgcatgaagaaactttgttgcaacatcatcccacaaagacaaagtcattaaagacaacatacataatatgagaattaaagacttgacaccagagttaatttcattccaacaaaacgacatataatttcaacctatgctacgaggatgggttatttaatgcaagacctaacgtttattcttttttctatttaccagtcttaccatcctccagagaatatagttttttgatgctaatatctttgctcgcctcttatctctcttgccaagaagattacaatctttcaattctttttcattgctttcaactaattgatttaataattcaaaatcgccattaagtagaacattccataaataacgagttttatgataagttctatttttactcaataatgtatgaatttcttctttccggttacctttgtataactgcatcacagaagagtagattctttcgtgcgcaaatgactcatgtcgataatgagtgatggttctacatgagttcattaaggaattttctctatagttatgcttatacatataatatggaaccgcatacatatcgcatgtaattagcagtcgatagataaaatccagatcttctcctagtcgtaaatcttcatcaaaaaaaagattattatcttccaggagttgttttcttataaacaagcatcctatatggaatctgacctttttataaaaaaaatcgaaaagtaaagacccttcattaaaatctgtatttataggtgagtaagtaacaccattttttatatgatggccataaagcccacaataaatcgcatcccctcccgtctcatgttgtctggaatacatcttcagcagatagttaggatctatctcatcatcatcatccataaaacatataaactgtccttgcgccttgcggatacctgtattcctggcagacgaaacaccgccattttctttattgataataattaatcgagagtgggttaacccatactctctcaaaacacttgatgtgttatctttagaaccatcattaacaataacaatttcaaaatttgggtaagtttgtttttctaatttcgttagagtttcagtaatgtaatcagatgaattatacgtcggtattattatggatactaaagggtaatcattgctcatcgtgttctcttgcctgaactaataaaatattatagtactcatccttaattattattgtaactcagacatccatgatttttattattgcccaaatagttttcttttatacttatttaatttgaatttaatgaagtaaataaaagcgttaaacgtatcaccatttttctttgcatgttggtatttcacttgatactgcttttcattcgtggctggaataaacgccacatcattccagcaagaaacctgataagcctcattaaaatacttctggcagggataattcgtccagtcgttccagggcttcgttacgccaacataatgaatcagcttagtatcatcggtaatggtctttttataatcttcatcgcttttattttttaactcatagtcaatgccataaaagcaatcataatcgccgctaataaaaatacaatgactaaagaacagaatatttaaaatatcctgatcaaggcatttatatttcgtgtgctgcgggtcacttgccagcatagcaatggctttattcataaaatcatttttcgcccatgcttcaagctgcagatatactacaccggcgttgaaataattccctggaagtccctctatagccagacgcttcgctggtttttcctgcataaaaggcacatctttaataacagccgcgaacttatcgccatcaaaattaatatcaagcaatccagctaatgagcctttacagatgacatcagcatcgatatataacagattttcaatagtttcactcagatactggaacgcaactaaacggaagaatgttgcataagaccactgtttcaggctggggaagatatcaataaaggcactggatactttataaattcttacttcaacgttagcatttttgctggtaaaagcattaacacgttgtagataatcttcatcaatgtagtcagtaaagagatgaaacttaaccgcaaggtccgggttatgcataacaactgattgcatagatactgccgcaccaaataaaaagttgcggtcaataccgtaagcgatatttaacacacgatcggtgttagcaatttccccagagacagcgacttcagtaatactctcagctaataaatccatgttggttccgttttgactgtgtggtttacgctttgccttttaattttttaataaatttgcgtagtttggttctgtagattactgaatagtagccataatcttttatttcgttggcaatacccaggtgacgttccatggccagacgatcacgggctttccgctctgccgtacagcttttaccggataggtcaattatcctgacaccatctttactaacgataaagttaccccggtgtgggtcgcccgatagcatatttaaggcatgcaatttttccattgaagccttaatttctgctttaacatcttctggaataatcggcatatcattgagctctacgccctcgacatactcgataagcatgataaaaacactggcatagttgaaaattttacgctcagccagaaaataaaaatcattaggaaaagtaagacctgcacttctgacacgatcggtttcaacgatcaaattctgatagtagtcaccttttacaaaagattttaaaaaacgttcattccttttcgttttcggggcaaagactttaaaaacatagcgaccatatttcgtatcaatcaacgatactttggtatcatcaatattacgtaatacttttactgttttaaaattataggccagtatttcatcaaagatttctttatatttattatcgttatctttgtaataaaatgagaagccgcgatagcgtatacttgtaatcataagagtaatttatttcttaagcttgtacttaattaatgaagttatacctttaatatactcaccatgggcaaacagatgcttatattgtttctgcatttctgcaacagtccgcgcctctttaagaggatatttcttccagggagattgttcacgcgcgatattaaagtatgatgcagacggatatccagcccagctatgccatggtttagttatccctgtatagtgaatcaatactgttttatcggtaatggtttgctgatactttcgatgactacgatcatgaagttcgtttttcagggtataaatagtatcaaaatccttcgcgaggtagatattattcatattaaatgcgatattcaacgcatcctgatctaaatatttaagagagccatatttagtttcccctcgtaaaagcgtgagtaaatacggtgtcaaatttgcttcatgccattttttaagattgacatagataacgcctgcattgaaataacgtccattcattccgggaatgttaagacgttttgcacatgccgcctgagtactatcattgtcaggaataaccgcagcaaactcatctttaaatataatttttgtgagaggtttcagacttcctttacaaacgacatcggcatccagatacagcagtgtggaaatactttcactcagatattcaaaggacaataccctgaagtatgtcgcgtacgaccaaaactgtgacgtcggcagatcagcaaagtattttgggtcaattaaatatacaataattgaggtattaaattgttttgctgtttcattaaatgactttaaataatcatcatccacataatcagtgaaaacatgaaagacaaaattaatatctgaattattaatcaaaacggaagaaattgaaacgccagcaccatacaaaaaattcttatcgataccgtaggaaacatttagctctgggacgttttcttttttattatctgctaaatacgaaaaccgttcttttataaattcattcatttaacttttctcaatgtcattttattatctttaaataaaaataataaatataattcattatcccgttaattggtttattttgtttaaaattatgcttagcgcaataacgagcataatttgagttcattggccgcattaacggttcatttttccagggcgatgcttctttgcctttgataaatggctgcgcgcttggataaccggcccagtaatgccagggttttgtcgggccgacataatgaattaatacggtttcatcattaattggacaaataaatgatttttttaattcataatttaaactaaattgcgtattgtatttagcatcaatgaatttaactttccctaacaggataagattaagtatatcttgatccatataggttaaacgggaaacgacggctttatcagcaagcatcgacatcgctttagcagaaacggactcctgcgcccacgctagtgtattaattaacaggacacctgaattaaagtaacccttttcaagttcattacactgcagactttgagctcgtaatgaccaccagttagcatcgcgttcagtaacaacagcagcaacgttattggcaagatccattgttatcagcggctttaagtttccctgacaggcgatatcagcatccaggtacaggatcttatcttgttgatcaataaagtaatctgcaattacaaaacggaaatacatggcaatagaccaatttttggtcgtcggtaatgccttaagccgttcacaattcaccagatggatctggatacaggtatgatagcttttcgctaattgggataaacgctggatatcggcttcagggatatcatcaataaaaacgtggaaaacaaaactcacgtcgttgttatgtaacaaaactgacgtgattgaaacaccacaaccaaaaagaaagttctgatcaatgccataagcaacatggaatgatgatgccactgacaccgctggcctttcatcgaagatgattgtcttattgatcatctcttgtggattaaaatagtgggcactcatatttctctccggaaattacaacgattttcgaatcgttctttccctgatttttgtggcttttgcttctgcttgcgacagcagcccttgttcctgcttgagaatgtctttaagcggggcaga

SEQ ID NO: 179 - DNA, 62 bp, Escherichia coli
tcattagcaaccatattcttttactgttgctctgcgattccttcctgcacgtactgcagaaa

SEQ ID NO: 180 - DNA, 140 bp, Escherichia coli
cggcattatggcactgaagggcaagaattttggtcagcgagagaattggcaccgttactggattatcgggactggcgcaattttcaaaaggtactggcccgcgcgactcaagcgtgcgaagccagcaatcaagccgcatc

SEQ ID NO: 181 - DNA, 7246 bp, Escherichia coli
aaggacgctagcggatatcagcgctagcgttccccgttattagcgcaaaattccatactcactgcacaataaccatttcaccggttcatcttcttctatcgccggaaaacgtcctcccggctcaagaaaataattatcgtgttggtcatcatttaccatcgagatttcccagccgagaacaaacgctttttccgcccagaagcgatgatacagacgcggcggcaggcaaatgccctgccccggctttagcaccagcgtttcaccaggtttcatggtacgccgctgaccatcaacactcacggtaatgactcgttgatcatcacagagattggcttcgttggcccaggccaactgcatgcataagtctccaccgccccgattgaggatatcttccattttgtgggtgtgaaaatgccagggagtctgctgatcttgttggatctgcaacattttctcagcatacggttttggatatgccgccgaccccagcgcgccgttgcgcatcgttagcagtgttagtcccgtttggttgaaatcaccacgaccaaaatcggtgatatcccaaccgagctgtaagtcgaccacttcttgccagttatcccgttcccgctgcagccagtcatccaccgtaaaataggcgaactctggcaaacaaacgcggaaggtctgcgcaatggcatgtgctttatcaataacataattaatttgtgaacgtttcattggcttctccgttgcgcatagcaagccaggcagcgccacgcattccgctactgtcgccgtgctgtgcttttacaatgggagtggtgaattgatcggtgaaaaccagtggagcgacttctgcgttcagatcggtgataagcagttccacattcgaaagcccgccgccgatcacaatcacgccagggtcaacaacattaacgatggttgccagcgtgcgggcaagctgttggcgaaaacgtgccacctgctgcatggcacaagcatcaccacgttgtgccagggtgacaatcgccgcagaagtgagcaagttaccagtcatctgttgatagcgttcactaaaaccgctgccggaaacaaacgactccacgcagttgtgtttgccgcaatagcaactgactgatggaccatcttcctgctccgtatagcctggcaacgtgatatgaccgcattcggcagcatttccccaggcccctataaacggtcgttgcttgatggcaatgccaccgccgcagcccgtaccaagcgtaataccaaataccacgtcataatcttgcccggcaccgtcgcaagcttctgatagcgcgaaacagttaccatcattggctatcaccaccggttgcccaagcaattgctgcaaatcagcctgtaacgcatgaccgttaatcacctgaatattcgcgtttttaatcaggccagtgagtggcgagatactgccgggtaaggcgatccctgtcagcatcggtcgttgaacgtcccgcctaatctgctcgataagcgccacaacgcatgagacaaattgttgatatgttgacttttgcgtcgggcagcggtaacggcgaatctcccagccatgcgcatccatgacaacggcggcgattttggtcccaccaatatccaaccccagatagtgcatatctcgttccttgttgcgtaaaaggcgggtcaccccgcccttctggcttagtacagtgatgctttaccgaacgaaccgaacagtttcattttgtggcgaatgacttcccgcgccgcgttaatcgcatccggatagatgacgttcgggtcccaccagctctctttagcgagaatttcacgcactttctggaaataggcgtatttcatatcgctggagatattgattttgccgacgccgagcgtaactgattcagcaatctccgcgtccgggtttgccgaaccaccgtgtagcaccagcggaatatcaatacgtccggcaatgtcgcgcaaaatgttcatttgcagcttcggctgcatcccttttggatagatgccatgcgctgtaccaatcgccacagccagtgtgtcggcacctgtacgagcaataaaatcggcggcctgcgccggatctgtgtaggtcacttgtgaaacaccaccttctaccgacgttcctgtttgtccgatggttcccagttcaccctcaaccgacacgccaaccgcgtgagcgaggcgaaccacttctgcggtcagcgccacgttttcttcatacggcagcagcgaaccgtcgatcattactgaggtaaatccgcagcgaatcgcacgcaaaacatgctctacagaggcaccatgatcgaggtgcagtacaaacgggaccggactacgctgggtaatttcgcgaacgtgagcgaaaaaggcatcgcccacaaaatcatgttcgctgggatggatggcaataatcgccggagtatttgtcgcttctgcttcatccacgactgcgcgaaggaaacagttatccgccacattaaatgcgccaatggcaaagccgtgctggcgggtaggttgcagtaattctttcatcgaaactaacatgttaaatctccagtttcagcgtgtagtccgccctgccggtgcgttattgcactggcataaaggccatgacagaaaatgaatcaggctttgccgatagagccgctcgcctgtaaatacggtgtaatcgcttcttcgaaggccagttccatagctttcagcgcgtccaccagttcaatggatatatcgtgacagagggtatgcaggagcgcggatttcccccgttcaaaaatggccgcccccacgttgatttttgctacccccagagtcgtacagagctggagctgatcgaacggcgtaccgctaccgccatgtaatgccagaggcacgctcgagcagtggaaaatctccgccagacgctgaaaatcaatagcaggtacaacaccaggcgcgtacatgccgtgcgccgtgcctaccgaaacggccagtagatcaatgcctgtctgcacgataaacggttccacatcagtgggttgcgtcatcatgtctgcattggcggcctggtcataacgcggcgcatctgccagatggcccagttcaccttccacgcagagctgcgcgctggcggcgagttccaccaccgccctggtctggcgcacgttttcctccaggggaaaagcagaagcatcaatcattaatccgctgaaaccagcacgaaacgcctgacgaatacagtccggatttttgccatgatcaagcgccagagcgaccggtactgaggcagattccgcgagcgttttaaccactgccgccgcgacgggtgcaggaaaatgcgccagatgcccctgatagagattgagaatgatcggagcgcgattcttctccgccacgcggatagctgcgtgagcactttccagattcatacagttgatcgccagcaaggcgtaatgttcatgccaggctttcatcaccatacttttcatatcggcaaacatagggcctccggttattcgagggtgaaagtgatctcttcatctttcagcttttgatcgctcagttcgtcaaactcttcgtcgcgttccgttaccggtttcttccagagtgaaagcatcacgccacaaatcaccgtgcctatacccagcgccaggcaaaacagcagaggatgggtgaacagaggcacaacaaacatgccgccatgcggaaccggactctccacgccccacaccatgattaagccgcccgcgaccgccgatgccaccacacaagatcccactactcgcagcaggtcacgcgcggcgatcggaatgactccttcagtgatcatgcagatccccatcggaaacgcggctttcagcgcctcgcgctccgcacgggtgtatttatggcgtgtcagtaagaacgaaagtgtgatgccaaacggagggatgattgagccgacaaatttcacggcttctggtccgtagacgccactgaccagcaagccatcggaaaacagcgacatggttttgttgaccggaccaccgaaatcgaaggttgccatcgcgccaagtatggcccccatcaggaagcgcgatccgccctgcatcgactcgagcaaatgaatcagtgcttcttgtaaccaggcgatgggtttaccaatcagcgtcatcattaacagcccaccgataatggtgcttaataccggcaacaccatgattggcatgagtccttgcatcgactgcggcaggcggatatagcgtttaagtagcaaaatggtgtagcccaccaggaaaccacccaacataccgccaataaatccggtatggatttgcccgcagagaaagccgacaatcaggcctgggacaaatccgggacgatcggcaatagaataggcaattgccgcgctaatcagcggcacaatcagccccattccccagccgccaatctgattaagcatccacgggattgttcctgttttttcaccaacatctgtaccgccaagaacttgccccaacgcaatacatatcccggcggccacaataaggggtatcatccacgagatgccggttaataaatgttttttaatttcctgtgaaaccggaattttattttctttcatattaagatccctccagtataaggatcatttgtttcccagtgatttttcgaccttttcaagaaattgaacgggcgatttaatgacgatctctgtctttactcgcacaatacgtttattggtgaagcgttcttctccttttattttcacatctacagcaagaatcacgacgtcagcagcagagatatctgccgcctgtaattcattttctgtaccaatggttccctgggtttcaactttaatggtatggcccagagcttttgctcctttgattaacttttcacgagcaatataggtatgagcaatacccgccgtacaggcggcaacacagacaatattcatgacatactccctgttatttagcagacatcggattgtgcatactgactaaagagatcaatgattttttgcggactcgtctcaactaacaattgttctatgatgtcatcatccgccagcgcgcccgcgacctgggaaagtaaacggatatgggtggtattttgatcttcaagacgtaccgcaaataaaataatacagcgcacgctactgccatccagcgtttcccagggaatatcctggcgggtacggccaattgccagcgtagtattaattaccgcagaagatttaccatgcgggatcgcaatatgattttcaaaaccagtcgagccttccgcttcgcgctgccagacatctttaataaaggtttcccgacaatcgatcgcaccatcttttttgagaagattagttaattcttcaatcgcctccgctttattcgttgcttgcatatctaaaataacgcgattcgtattcaggatttttgttatgtccattcgtcatacctcataaaattctgacattaaatttcaacgacccgagacgtcgcatgatgtaatttttccgtaatcaccatttcagtgacccgcttaatatcggcatcattaaaaaaagcggtaacataagcgaccggcatagtgactgtaggcaaattaatggtcgaaataatcagttcgatattgtcaggcaaaacctgtgataaattcgctgctgaaataacatcaacaatcgtccattcaggaaatgctcgcagaatacggcttttcagtagatgcgaagttccgattccggttgaacagaccagtaatacacgtttacgggcaatttgccgctccatcgcagcctgaaaatgaacggtcaggtaacccacttcatcctcgctcactgcattctcaccccaggttttaaatacctgattcaccacatattgcgtcaaccgccagacatccgctaattctgctttaatatcttccagcaatggattacggatatgaatgcgataatttagacggttaatcagcggcttaatatgcaccaataagccatcatataatgcgctgtcttcactaaaatcgcagtccacgatgtcactgaataccgtaattaaacgccaggtaatcagacgcgcttcattgctggcctgcatatgtgaaataatgctaacatctttttgtccatcaatcgccacacctgatgaaatgatatattgataaataaaccagacttcatcatcgggcaatgtatgtgcaattcgttgatctatcttatgaatcatctgactggcaacattaaagatattttcatcatattgtctggtttgatcttcttctcttgataacgcattcccgtgcgtgttgcgatacatcataataaggatgtgagtaaaaatgttaacgtaataaggttctcccaaagaccaacttaattcattttccatatccagtaacaatgactggacaaataacacctcttcttctccaaaataatggactaatgctttatagcttccgggatccagacgtgaatacacgacaccttgcggctcattatggttaataatgccgttaatcagtaatgccattgcctgtcggacttgcccttcactaccttcaatatgcgtaccacttggactgcggatcaacgataaccccaacggcgcaagccaggactcaattactctcaggtcattaacaatagaggctccgctgataaagtagcgttctgacaatttactgatcgacgtttcattcggtgtttcacttaataactgcgacgctattttaacgcgcctggcattattcattacacaatcaatctcttcacattctgccaccaacaaatgatcaagatgcagcaaatcagcaatattctccgcacttaacatcacacccgcgccagcacgcttctcaacatttattctccattgtcccagccattgctcaagtaaacgtaaatcacgttgaatggttttttccgaaacatttaaatagccggcaatcgtaacaatagtcgtatattcccttcgaggtaaaaggaatcgtaataatctgttttgtcgcgaggtatccatttggcatttttttaccccttatcacacccatatggaagagcttcagttgccatctctgagggtaaatataaagcagaataatttcacaacaatactaaaatctgtccgtaatccggacagtgataaaacaaagcaaggcggttaagggatatttttcagcacagatcacattttcgtgatgaataatcgtgatcatgctcgcaaatacgatggaagaaatatttattaccagatgtgagattatttaccggatacgacacaaaaccatt

SEQ ID NO: 182 - DNA, 68611 bp, Escherichia coli
  misc_feature (6077)..(6077): Unsure
  misc_feature (6079)..(6079): Unsure
  misc_feature (6081)..(6081): Unsure
  misc_feature (28028)..(28028): Unsure
  misc_feature (28045)..(28045): Unsure
  misc_feature (29981)..(29981): Unsure
  misc_feature (30568)..(30568): Unsure
  misc_feature (37827)..(37827): Unsure
actctcccaatgtcaataaatctcttctaatcccttgtatatcagtatttatttgtatccagaggtcaacctacttcaccccgtatcaagtttcttttgtgggtactttagggggtgttatttcctattgaaataccagcacccccataataggaaaaatgtgatatataacaacggcttttaacaacatctttgttatacaaggggtgtattgggggtatcaggttagttactggcagaaatccccctcaggaacatgaattcatcaaaagccggaggatgtcatggcattaaccgatatcaaagtgaaaaccgcaaaacccaaagacaaaccctataagcttgctgatggcggcggtatgtatctactgattaacactaatggttctaaatactggcgcatgaagtaccgctttgctggtaaagaaaagatgctttctattggcgtataccccgatgtaacgctagccgatgctcgcgagaaacgcagtgaagccaggaaactcctcgctgctggaggcgatccaggggaggcaaaaaaggaagaaaaaatcgcgcagcaaatgagtctgcaaaatacgttcgaggctattgctcgcgaatggcaccagtcaaaagccgatcggtggtcattacgctatcgtgatgaaatcattgatacctttgaaaaagacatttttccctacattggcaagcgccctattgccgaaatcaaaccaatggagttactggaagcactgcgtaaaatggaaaaacgtggagctctggagaaaatgcgcaaggtccgccagcgctgtggtgaggtgttccgctatgcaattgttactggccgggcagactataacccagcccccgatcttgccagtgctttagctacaccgaaaaaagtacattttccctttcttactgctaatgaacttccccacttcctcaacgatctggcgggttataccggaagtataatcactaagacagctactcagatcattatgttaaccggcgtacgaacacaagaactgcgttttgcacgctgggaagatatcgattttgagacaaaattgtgggagatcccggcagaagtaatgaagatgaagcgacctcatattgtgccgctctctgagcaggtcattatgctatttaagcagcttgaaccaatctcaaaacatcatcccctagtctttatcggtagaaatgatccccgcaaaccaattagtaaggaaagcattaaccaagtaattgaattacttggatataagggaagactcacagggcacggtttcagacacaccatgagtacaattctgcatgaacaaggctttaattccgcctggattgaaatgcagttagctcatgtggataaaaattccatcaggggtacctataatcatgccctgtatctcgatggccgccgtgaaatgatgcaatggtacgctgattacattgattcactctccagccgggaaagttaagtcaaaaatacttttccctgatgttttcctcaattaagtattttatcctctggcctacaaggctggaggatttttgttattatattattttttgcgtcttcaaacttattacaaaaacataattaaaagcaaattgacatttttaaattggcaattacaaaatacagccttgcagttatttcgatacctttagcaaaggaaaagttgattcagatataatttagcatttcaatcatctgacatcattataaaaaatgagattcacataaagataaaattattgttctcaaggaaagcatgaaggggctttgtaagcaatattcattcagtgccaagacaggacttgatacacagaatctcaacttttatgctctcagactatatcaccacatgttttacaggctcagaaaatgaacgatagattatgctttgaagtgcacgataaccagggttatttcgtatttccggatacctggtttggcccattgctgggggagtttgaagaagtgcttgatgcatacgacgctgatgaaatcagcgagacgagttacatcaacaaactccgacgccttgctcaacgggagccggactttattgatatacacgctcatctggcatatgcatttctggaacagaatgccccgcgtaaggcactgaacgccgctcttaaaggactggcggcaggtaatcgtatcatcccggaaagtttctgtggtgaaataatctggatgcatcccgaaaaccggccttatctgcgcgcgctttatgcagcaattctcgcaaatgtgcacttacagcgccatcaggatgcggttatgctcactgataaaatactggcatacaatcctgaagataatcagggggctcgctggttgttgggttcagagctgttacgcaccggcgatcatgagcgagccttcagtgtactgaaagagcatgctgatgaattttcaccttactggtatgaactcggtctcctgcattttctgaacggggaacatgttaaggccgccacagcttttcgccatggctttgccacaaacacttacatcgcagaaatgctgtgcggaaatctgcatccatttccacttgctgtgtggcatgacttctccggctctctggatacggcagaagattactatgcaacatactcaccattatggggacaatatccggaagcattgctgtttgtaaactggctctataatcattcctctgtgctgcatgaacgggcagaaatcattaaatgcgccgaaatgctgatgcaggaagatgatttcgaaatatgcgaaagtattttaagacagcaggagaagttgcgtgaaagaattgatgagacgctttctgagaaaattgtacagaaatgcagaaatatgaatggtgaatatgtctggccctggatattgccgttttcagcggcaggcatgaaacatactggcatacagtatcagtagatattgcattagtgtatcctgcacacaagtaataatttatccaccaataataacactgttaatgtccccttcccctggttgtcagccaggggttatcttctgaatatttcttttgaaaaggataacacagtaaattatttttatgaattatcccatggactcattaacaccctttcataatgctttattgtcaaacacgttatggctgacatcaaaaaaaaccggatttcctctgccagcgggtaatcaccttcccggtgttttcggttggtctggttactcctgtctggttattagcaagataattgctataaacagtggaaaactcatcgtacataatctggtgatgaacattacgcttattttcccttgaccggaagaatcagaggctgtggtttcagtcatacagtctatctcctttaatcggagttggctctttccctggccgtatacggcgaacagattctcgtattaccagtttcccatacaaaagtaatgcaccaacagttgcatcaggacgtacaagtctttgttgtaacatatgtaccgcttcagtacccagttcatcgcgaggtacatgtactgccgtaagtggcacatcttctattgcagccagattaaacccatcaatactcattacggacacatcttgtggcactcgtatattacgtttttttaaagcgttaattatacctgcagcaatgaagtccccacttgccaaaaaagcagtcggtagcatacttttctctgtcatatccagccatgctccgactttttcttcggcttctttggcgctgaaactattaatagtgagtaaatctctgtcatctttaaagttctgattctgtctctcccatgcttctttaattccggcaagtcgcagttccattgtgtatcgacgtaaacacataatgttcattactctgcgatgccccatttcaaacagaaagtgagacgcaaaagcaccaatgtttttgtgatctggagcaactgtgggaagacgcatacgtcgatcatggcagttaatcattacgcacggcttagaaaaatctgctgcaagatcatgtatatgaggatcatcaataccaagcaatattgcagcctgtgtttctgcctcattcatgcgcgccaggaattttgaaggtgtactatcgaactcatcaagggcacagtaacgcaaccgaacctcataatgcgataatgccttgctgatgctttggattacgcggaaataaaaaatgtctgttcgctcatcaaaagcccgttgaggagcaaaaatgacaaggttgtttaacaacatacggccggatgccattccatccataaccccaagctctctggcacacgccaatactttctcgcgggcacgataactggtattagctttacccgctaaaacccgtgacacggtgctggatgaaaggcctgttcgcatggcaatatcagcaatctttagttttttttccatattgtgatctatctctaatttcaaaatgaaaaaattctcatgggatggaatagcctgactgcaaggacttctaactatttttagaatttatatgaactacttatgaaaaaacgtgcacaatatcaactttttttcatcgcccccctcttttattgtgaatgagtagttccggtttaagtattaagccgaaaggtaaagtgggatgtggcaaccccgagctgcgttgtcgctcgatcatttattacatccggtggggtgattatgagtcaggatataaataataatatagctgtcagcaaacaccgtcgaataataagacaactacggtggtggatgttaatcctttttctaatgggtgttactgtcaattatattaccagaaactcattaggtattttggcaccagagttaaaagacagccttggaattacaactgaacaatactcctggattgttggtggatttcagcttgcatataccctttttcagccactttgtggatggctaattgatgttattgggctcaagattggatttatgatttgtgcttcattatggggaattgcttgtcttctgcatgcaggagcaggaagctggatacagcttgcgttgcttcgttttttcatgggaggtgctgaggcttctgcgacacctgcaaatgcaaaaattataggtgagtggtttccaaaatctgaacgtcctgttgctgctggctgggcgggtgtcggtttttctatcggtgcaatgcttgcaccaccaattatttactttgcacatgcgtcatttggttggcagggtgcatttatgtttacaggtgcacttgcaattctttgggttttcctttggtgggcgtgttataacacaccagaagagcacccaaacttaagtaaaaatgagctcaactttatccgacaggataacgaagctcctccggtaaaaatgccttttctgaccgcgttaaaaacagttagtaaaaataaacgcttttatggaatcgctatccctgcatttatggcagagccagcatgggctgtaatgagcttttgggtgccattatatcttgcaaaagcatatggcatggaccttaaacaaatagctctgtttgcatggttaccatttctttgcgctgatttaggaagtattgccagcggatatctgacaaaactctatacccgtctgtttgggttaagcagagtaaattctgttattgcgtcctctgtaagcggagcatttctaatggtttcgcttgctgtgattgcttttatcgacaatccatatattgctattgtacttatctccattggtggttttggtcatcagataatttcctgcatgttaagtgccctggtcgttgaatcttttgataagggacagatggccactgttaatggaatgcgtggttcagccgcatggattgccagctttttgttctcactgattattggcgttactgctgacaaaataggctttaacccgctatttatcgccatgggattttttgatcttattggtgctttttttcttgttacttttattgcagaacgtcgcaaaaaacgcacctgagggagtatgtggagatgaaaacattaaaaaactggaaactacaaaatcagtcagcccatcatatagagctattagttgatggtcagcattctctttgcctgtatatactcgaagaaaatatgntncngggttctattaaaacggaagggggttttgtcgctggaccgaacctggagcattgctccggaaaaggatgtcccgtgggaagggcgtcatcgccgaagatattagcggtttttcactgccgacctggaacatggagcagaatgatgaattactgacaatcacgaccagtttattacgcgtaattattcacaagcctttatggcttgaatggcattataaggataatgctggtcagtggcaggaacttgttaatgatcgccctaccagtgcttatctgataaacgctcatggtgatggtgttgcacactatcaaagtcgacgtaatgacgagcgtttttatggacttggtgataaatccggggatctgcaacgcacaggaaaacgctatgaaatgcggaacctggacgcaatgggatataatgcagtaagtacagaccctctttataaacatattccatttacaattactcaccgtagctgatattagcatttggattattttatgataacctcagcaatagttggcctggatttaggtaatgaaatagataattatcatacaacttaccgccgttggcaggctgaggcgggagatattgattattatcttttcactggcagatgtgtacttgatatcaccaaagcctttgttcgwttgacggggaaaacactcttcggtccaaaatggagtcttgggtacagcggttccactgatgcactatacagatgcaccggatgctcagaatcaattgatgcagtttattcgtctttgtaaggaacatgctattccatgtgattctttccagctatcttctggttatacttctattaatggtaaacgctacgtattcaactggaattacgacaaagttccacaccctaaaatgatgagtcaggagtttcataatgcagggatacaccttgccgctaatataaaaccatgtttattgcaggatcatcctcgctataacgaagtagcagaacaagagctctttattcgtgactctgaatacaacgtcccggaacgctccagcttctgggatgatgagggttctcatctggactttacgaacccacaaacagtcgcatggtggcaggaaggtgtaaccacacaactacttgaaatgggaattgattccacctggaatgataacaatgagtttgaagtatgggatggggaagcgcgctgtcatggttttggcaaagaaatcgccattaaacacattcggccagtaatgcctcttttaatgtgcagagcatctatggaagcacagcaaaaatttgcaccgaacaaacgaccatatttgatttcccgctctggatgcgccggattgcagcgttatgttcagacatggagtggggacaaccgaactaactgggatacccttcgatacaacacccgcatggggctgggaatgagcctctcaggattgtataacattggtcatgatgtcggtggtttttctggtgataagcctgatccagaattatttgttcgttgggttcagaacggtgttatgcacccccgatttacgatccactcgtggaatgatgatcatactgtcaatgaaccatggatgtatccggaagtaacacccgcgattcgtagtgcaattgagttacgttatcgtcttatgccttatttatatacattattgtggcaggcacatgccgatgatgagccaatattacgtccaaccttccttgatcatgagcacgatgttcagacatttgaagaatgtgatgattttatgctgggacgcgatattctggttgcaagtgtcgtggaagcagggcaacgacaacgacgagtatggttacccgacaacaaaacaggatggtacgacttttacaatggcgaatggttctgtggtggtcaatggataacaatcgacgcgccactggaaaaactaccattattagtacgtgcaggtgcaggtattcctcttagtgaacgtataacatacgtgagtgaagcggaagataatcatcgtaaattgaaattattcccaattaaaggaacgggtaaatccaccggacttctgtttgaagatgatggcgaaacttggggatatactgaaggtaatgctctgtggcttgaatgggagctggactgcacagccactacaattgagttaagaataaacactcatggagattatcgccctgcatgggaaacattgaaagtgataattcctcagggagaaagtcgtcaactactgattaacggcattgaggcttatgaatggaatatgaacctatcctgtaatgattaatttattgtagagggtaaatcatggccaaataaaggcactgtaagagtaaaacttatagtgcctttatatacaagccagattataacgccatgcaatgaaacgcccccatgcatacgtagattaactatctcttaccattttacatatccgaaagaatatgttttaacagaaaggtaaaacataagcgataataaaaaagagcacttccacaatgtaataataagatgggttattattttcgccactattgaatacataaatttatttataaagtttctctaaagtcttaatacccatcccatcaaaaaacaatgcggggttgttaaaataacaacataacactgttttcatgagaatagtaaagcgtttattcaaaaccgtttatagcaaccccataaacccaacatagcaattgagtttaaaaaggagatttcattgccccctatcaattaaacttcatgttttttagtttgtttataaaacaacatcatatctcctataaaatactcagcagtattaaaccaccttatctttaaccaaactatttattccgcaagcccacacttatggatatttaccgttggtaatgactccaacttactgatagtgttttatgttcagataatgcccgatgaccttgtcatgcagctccaccgattttgagaacgacagtgacttccgtcccagccttgccagatgttgtctcagattatgtcgctcaatgcgctgagtgtaacgcttgctgataacgtgcagctttcccttcaggcgtgattcatacagcggccagccatccgtcccataccacgacctcaaaggccgacagcaggctcagaagacgctccagtgtggccagagtgcgttcaccgaagacgtgcgccacaaccgtcctccgtatcctgtcatacgcgtaaaacagccagcgctgacgtgatttagcaccgacgtagccccactgttcgtccatttcagcgcagacaatcacatcactgcccggttgtatgcgcgaggttaccgactgcggcctgagttttttaagtgacgtaaaaccgtgttgaggccaacgcccataatgcgtgcactggcgcgacatccgacgccattcattgccatatcaatgattttctggtgcttaccgggctgagaggcggtgtaagtgaactgtagttgccatgttttacggcaatgagagcagagatagcgctgatgtccggcagtgcttttgccgttacgcaccacgccttcagtagcggagcaggaaggacatctgatggaaatggaagccacgcaagcaccttaaaatcaccatcatacactaaatcagtaagttggcagcattaccgatttgcagcatactaatttcagtaagattgccgcccttcttgtttaaaaggcggcattgctagcccagtaaagatttaactcggacttatacctttaaatatccaccaataaacagggcaacgacgataatatcgcacagcaacagcataatcagataaatcagctcttttttggtaaatatcggctgaccatcatttttttcttttcttgaccagataaagaccggcagaccacaggtcaacaggataggaattaatgcaacatactcaatctggctggcgtaaagaataaacagacagaatagcgagcctaaaacaccgctggacaaagccagcctgcggcctttttttgcatactgatcatattttccgtttctgcaaatactggtcagatacagcgtggtggtaatataggccggaacaaccatcagcgcactgatattatacatggtggtccaagcattatttgaaaaataaacaagtaacatggccgcctgcatcacaaagctactaacccacagtgacacattggccgcctgtttactgttcgttcgggcaaacgcgcgcgggaaagcgcctttctgtcctgctaccatcggtatttcagcgcatagcatggtccaggcaagccagccggccagaacagaaataatcagccccgcgctcatcagccagtcgccccactgaccgacaacgtgggcgagcacgcctgcggtagaggggttactgacctgcgctagttctgcctgaggcattacaccgaacggcagaatggacattaacatataaataattagcgccagcagaaagccgatcagtgtggctttccctacgtcctgtttatttttggcacgtccggatagaacaaccgctccctcgacgccaataaaggcccagagcgttacggtcatcggtgccagaatctgagacagcagcgatactggtgcggcgtcatttccgttgccactgaggatcgcgggtgattctccccaaaagtttttaaacaggtccgaataatcgatcagcacacccagcagtaatacgaataggatcagagggacgagcttggcgatggttcccaaggtgttaacaaatccggccactttcgtcccggacagaacaagaaaattatagccccagatcagcactgagccgcagataatggagttcagattattaccatccgtaaaaacccccggcataaactgattaaaagcatccattaaaattaccgcaaaggcaacgttgccaaatgcggtcatcagccagtagccccaggcgacgttaaagccaataaaggaaccaaaaccttcctgggcatacatatacactccagcctgaaggtccgggcgcagatctgatagtacgcgaaaggagtttgcgataaaataaataccgatcccggcaataatccatgcaatgattactggccctagtgcagaagaggccgccgtgttttgcggcagactgaaaacgccgcctcccagcatggagctaacgacaatagcgatgagggatataagccccagcttatgtcctccggcgctattgtcactattttttacatctgaagattgctctgccataacgtttccctcagctattctataatattgccgtcggattgcaggcgatccgacggtattgttctttcccccgcctactggcggccctttttaataccagagacctggcgtttaaaggttatgtggccgggtagcgactgcccatcgcgttcttcttccacaatcgctctgacccagaagtccccgttttcatcgacgttaacgccctggatctcatgttcaaaacctgggaattgcttatcgaattcctgcagggcgcgcagatagccaataatgcccttgttaccttgcggcatccgttcgcccggcatcagtacaggaatgcctgggggatatgggacgagcatgctggcggcaattctgccgctaaaatcatccagccggatatgctcggttttgtagcgtacgactttctgataggcttctgccggggtcataactggttccggatcggtgtttaccgcgtcgttgatatgcgacatcagctccagctcatccattttttcatgcattatctgacatagctccttgagggttagcgtgtcgtagtgtggagaatgcgctttcagcgacgggatagcatctgtggccagatcgtcattgtcgtaatgctttttaaaggccagcaggctttcaatcagagttccccatttgcctttggtgatgccgacggagaacaggatcagcacggtgtagtcaccagtacgggcaatttcaatgcgacggtcatcgagaaaacgggtcagcaaatatcccggaataccgtttttctggtattctcccttcgggccgatccctggacaagtcagggtcacttttactggatcgagcatactgttggtttcgaccagatcatcatcggcaaaaccgtgccagcgctcaccggagcgcagcgaccagcagtcggcgctgtggctcagcagcgatacgggtgcctcttcaaaactgtatcgctgcccagaatcgctgtcctgcacttcggttggctgaagcacatcgaagaaccaggcgtcaccaccttcctgctcctggagctggcgcttgacgctgaccacggctttacggaaggcaatcgcttcttcaattgactcctgcacaagcgaataaccggattcaccctccatcatgcttactgccacatcaattgatgcaatgatcgggtagtagggtgaggtcgtgccgtgcatcataaaggcatcgttaaagtcatcgaaattaagcggcgcgcgatcgcttttcttcacatgaatcattgaggccatggagagtgagggcagcattttatgggtggactgtacggcgaatagggttggacgatttggcgtttcctccgcgtccattgcatagcgactctggtatagcggatggaaacgcgcataggcataccatgcttcatcaaaatggatgcgcggtgcgctttcacccaggtgtctgactacatcgttcacgttataacagaagccatcataggtgcagttggttaccacggcgtaggacggggactggctgaccgcaccagatgccagtcggctgtttgccaccagcgcatcaatactggccttcttcaggcgtccggtcgggataggcccaatcagcccccacgcgttgcgggtaggtttcaggtaaaccggccttgcctgagacaaggtcaggccatgattaagtgacttgtggcaatttcggtcaataatggcaatttcatctgcgccaaccgcagcctgggccacaatacggttcgaccccgatgagccggaaacaccgtagaaggtccaatcagagccaaacagtcgggccgcaatttcttccgattttttaggcggtccggcgtggatcagataatcccccatctccgcggtagccacgccaatatcagcgcgcatcatgttttcgccaaagaagttaatgaactcaatgccaacaggatgtttcagataggccattccccccatatgccccgggcagtcccagtaatagtcaccgtcctcggtaaagtccttaagggttttaaagtagggaggaagaagcttatccgcatagcggtggactaaggagtacagtcgattggcagtgaaggctgcggattcagagaacagataaacatattcgctgacctcttttaagacgtcgagtgggatacgatcggtaatattctgttctgagaaaattatcagcggcgtcgtggcatttcttttgcggaatatgctgataaagtgctgtagctcttctgcaaaggtcggattgtctggctcccagtaaaaaccaatcccgctgtattgggggcttttttcgatgatttttaatccatcagagatctggtgcgtgatatgaattttaaaaccgcgttccgcgagttcggtttgaagctcttccagtacctgctgcgaagggttgtcgccatcaagatattgtgaggaaataaataaaagattgtggttaaatttcattaggtgtctccactgttactgttcagatagtatttaactgtgaggatgtcatgcccaagaaacagacattatcgtcaccttaacttgctgtgaattaatctggactaaaaatgtatcgttttataatgcagtagaataaaaacaatgatgtcgaggaccagcagtaaaataaaaaatgccagttcgcgtagcgtaaatattttatctgcgcgatcgtctttttttcttgcccagataaacaggggcacgcccagcgtaagcagcaccggaaccatcgccagatatttgatttcactggcgtagaacataaacaggcagaatacaaagccgataatactgctgaccagcgcggcgctgcggctgtgattcgtggtatagctggcatactcgccgctaatacatagtttaaacaggtatgccgtggtcattaaatacgcaggtaaaacggtcagggtagagatagccagcattgcaagccaggcatcgttagaaaagtagaccagaagtacgacgatttgcataaacgcactgcttatataaagcgaaaccgaggccgaacccttcacattttttttgctgaacggtttcgggaatgtgccgttctgcgcggccaccataggcagttcggcgcagatgatggtccacgccagccagctggtaagcaccgaaatcagcacccccaagataatcataatcttcccccattcaccgacaacaatcttcagaataccggcggtggatggggttggaattgcgctgagctcatgttgagtcagcacgccaaacggcaggatggagaccagcagacagataatcagtgatacaacgaagccaatgaatgtggctttacccacgtcgcgtttatttttggcccgaccggaaagagcgacagccccctcaacgccgatgaagctccagagtgccacgctaagcggtgaagttacctgtgagaaaatagagcctaggtcctgactggccttactcgcgctgtgcccccagacgttatctgcgaacgtggtgtacttcataaacagcatgagaataataataaaggccaccagcgggatcagtttggccagcgtgccgacgatgttaatcgacccggcaatgcgggtaccggagaggactaaaaagttgaatccccatatcagcaaagaggcaccgataacggaaggaatattgttccctcccttgaaatcacctggtaagaaataattcagcgtatccatcaccataatggcaaaggcgacgttgctgaatatagtcatcagccagtagccccaggcgacgttaaatgccgtaaatcggccgaacccttcccgggcatacatataaactcctgactggagatcaggtctaatgtttgacagcacgataaaagttctggagatgaaaaacatgccgataccacagactatccatgctatcgccaccgggcccacggcagaattctccgccatattctgggggagtccgtcaacgccgctgccgatcatcgagctcacgacaatggatgttagcgcaagcaagcccaacttttgtttattatttttttcagtcgaatcgatatgcataagctggctcttattttttttaaatcatagaatctctttgtaaggcttcatgttgtggacactaatttctctgacgatataaattaattataaataaggtcgtcacgataaaattcattatattcctaatttattctatgtatataagaattaacccttgctatatgtaatcaaagtcctacgaatgtaggaaagggtgatgcctctaattggttgaatctgatgtataatacgggcttttgaggttatctcatggccagcgttaatattcattgtccccgttgtcagtcagctcaggtttaccgccatggtcagaaccctaaaggccgtgacagatttcgctgccgtgactgccaccgtgtgtttcagctcacttatacttatcaagcacgtaagccgggtatgaaagagatgatcactgaaatggcctttaatggtgccggggttcgcgataccgccaggacactgaaaattggtattaacaccatcatccggactttaaaaaactcgcaccaacgcaaataacttcttcgcctgttgcccatgctgatgtggcgcttatctgcgagcttgatgagcaatggagctacgttggcagtaaagcccggctacactggctctggtacgcgtacaacaccaaaacaggcggtgtactggcctacacttttggtccccgaaccgatcaaacgtgccgggagctactggcactgcttacacccttcaacatcggcatgctcaccagcgatgactgggatagctatggccgggtggtgccgaagaataagcatctgaccggcaaaatattcacccaacgcattgagcgtaataatctgacgctacgcacccacattaagcggttggctcgtaaacaatctgcttctcacgctcagttgagatccacgaaaaagtgatcggagcatttatcgaaaaacacatattctactaattggatgcactaccgagatttgaatcaaagcgttggtatgcaagggatgtgtcgaactctctagtgggaaaactgcggaagaattgcggggaagtggcggggaaaaacttcactgttgatgctgaacagtctttctggttggctcttgttcgcactatgtacagtgttagtttgattaaactcggtgagtgtgacaaagacggtaatttttgcagttttaggtgaagtctaatgggttaagtgatttcggctatgctcccgacagattaacacgctacatcggtaactatgtcagcgcttggctaacgaagctgaaggtccgctgtgagcgatgagcagaccaactaatctcagcctacttgttttatttcatcagtacgccctgaagcatcgactgcgtatcttgtaggaccgctaacattgatgcctatataattgaagaccgaatctggtttgatataaatcaaaaaagatagatttaacctgatgaaaagaaaagcaattcttgttttctgacaaacactgggatatcagcgttgattattagacgatcggtcaatattgtttattgactactttatagctcaatgacatcaaaccagaaagacgagaaaaaaatgtttaaatccttattaatcagtaagatgtatggtcgccacagtgcccaaattgctgaaatcgctgaaagcgagctgccacagggggatgtggaggtcaatgtcgactgttcatctatcaactacaaagacgcactggctattacgggccgcgggcctatcgtccggcactttccaatggtgccaggcattgattttgccggtacagtgtccgccagctcacatcctgaatatcagaccggggataaggtcctgctgaccggctggggtgtaggagaaaaacattggggtgggctttccgaaaaagcgcgggtaaagggagactggctgacgccgctcccggcttgaagtggcacactgaatttggccacctgaacagaggtgatatgctcacctcagaacaacacaggtgctccaatgaaaaaaagaaattttagcgcagagtttaaacgcgaatccgctcaactggttgttgaccagaaatacacggtggcagatgccgccaaagctatggatgttggcctttccacaatgacaagatgggtcaaacaactgcgtgatgagcgtcagggcaaaacaccaaaagcctctccgataacaccagaacaaatcgaaatacgtaagctgaggaaaaagctacaacgcattgaaatggagaatgaaatattaaaaaaggctactgtagattcaatctgtcaatgcaacacccctttcaattatctctttcggtgttttgaacttcagtgtctttctcggtctgttgtttagctgagcagcaaccagatctagttcatgttgagtatattgggcaagacatgtctttttaggaaagtactgccgaattagcccatttgtgttctcatttgttccccgctgccaaggactctgaggatcgcagaagtaaactttaacgccggtgctgacagtaaattctagatgtctggccagttccattcctctgtcccatgtcagtgattttctgagttctgacggtaaactcaggaatttgtcggtaagagcctgatttactgagacagaatctttgcccctgagtctaaggatgatcgtataacgtgattttcggtctacaagtgtggctatatgagagttttttgtacctgagactaaatcgccctcccaatgccccagagagcgtctgttatcgatatttcgggaacgttcgtgaattggtgttccgttcactatgttaatcgtacctctttcgcctttgcgggtatgacgcctgccatagcgaaggctatgcgaccgtcgcagatgctgtatattcaggtggtgtagcgcttcacggctacgaaagtacagcgttttataaattgtctcaggtgatattcgcagcgttttttgacgtggttttgttcgccttaaccatcctgatatttgctctgaagaccatttcatctccagcttttccagaacaagctttcgcaatggcaaattttgatccagtaagcacggttttggccttttcgccattctgttggctcggttattagcatcaacagctttgtaatagcgtctgccccgattacgctgaacttcacgtgagatcgtcgaaggactgcgattcagcgcagtagctatcgcacgaatgctcattttggctgacaaaccagctcgtatctcctcgcgctcagacagtgtcaggtgagctacagcccgcttacgctcatggggttttatgccgccagtatcccttaacatagtgaagatcgttccgggttttgaacccaggatattcgctatttcactgaagcctgttccgttcttccatagttcaaaaacagaggctttttcctctgctgtaaatgttcgtctcattcaaaaaacctccgcaaccccatgttttcacataactgttgcgttgaccaattgaatctacagcggcgtacttcgcaaagctgtccgactgaggtacgcctttatccgtgacaactcctgttgctggcctgttcgcctgctctgtcgggtgctggatgttcatcccagtggtttttacgcctggcttcagcagccgcattcacaacgccatcaggcagacctgagactgacaggacagattaaacagttctggctggaatcgggatgcgtctatggttatcgcaaaatccatctggatctgcgtgacagcgggcaacagtgcggagtaaacagagtctggagactgatgaaacgtgtcggaataaaggctcaggtcggataccgaagcccgcgggcacgtaaaggcgaggccagtatcatgtcacccaacaggctccagcgacagttcaatccggatgctcctgatgagcgttgggtaacggacataacctacatcaggacccacgaaggctggctgtatcttgccgttgttgttgatctgttctcacgcaaaattatcggctggtccatgcaatcccggatgacaaaggacattgtcctgaacgcactgctgatggctgtatggcggcgtaatcccgaaaaacaggtgctggttcattcggatcagggcagtcagtacacaagccatgagtggcagtcgttcctgaaatcacacggcctggagggtagcatgagccgtcgcggtaactgccatgataatgcggttgcagaaagttttttccagttgttgaaacgtgaacggataaagaaaaagatctacggaacgcgggaagaagcccgcagtgatatttttgattacatcgaaatgttttataacagtaagcgtcggcatggttctagcgaacagatgtcaccgacagaatatgaaaaccagtattatcaacggctcggaagtgtctagattatccgtggcgattcattatgttcttcggcagcgatcacggcggcgagcgaggagcactgttgtacgggctgatcggcacctgccgactgaacgatatcgatccggaagcgtatctgcgccatatcctgagcgtactgccggaatggccttccaaccgagttgacgaactcctgccatggaacgtagtactcaccaataaataagcgtcaatacggcactccgttaacgcttacgtttaagtcataaagccatgcagaacgctcacctcccaagatcttggtttttataaggtgtaatgataatgtaagctaatgtttcacatgccaaaggaaacaccatgagccacagggaattgttcagcgaatttcttgaaaatttgaatcttgacctcaaacaggcaaaaaagatcagctatcactatcgaaaaataaccaagtcattaaatcttgcgttcagaggaacgagttcccgggtagcaaaccgcttgaaagtggggtcagtaggcagacataccgcaataaaaggcatatccgatctggatatgctttatattatgccccccaatcagtatgaatattataaccgtaaggataatggtcagtctgcattgcttacagatgtcagaaacattctggcggaagaatatcctgaccagactgtgaaaaaggacagactggttgttcagatcatctttaaaaacttttatgtcgaggttcaacctgtattcagacaggatgatgacagctttaaattccctgaaagctataatggaggagcatggcgcattacaaaacctcttcacgaaaaggcggccatgaccgcattttcgcgagataaatccaataatctgcgcaagctgtgtaaaatgatcagagcctggaagaacctgcatggcgtcaatatgggtggcttactgatagacacactagcgtatcgctttctttcatcaacatcagattatgacaataccggaaatggcagcctgggagccctcgccagagacttttttgaatatctgtcaaatgaggagagaaaggaaaggtatctcgcgttaggcagtaatcagcatgtacgtgttaaatctccctggtttggccgggcagcgaaacacgcgtatgaattatgttgtgatgccttagacgctgagggggctgccagtgaaaatgaccgctggcgcaaagtgttcggacgagccttccccagacgtaaagtgggtattatggaagcccgtcttggtctggaatcgcatgcggcagatgctgttccctggaccgataccgaagagtttatagaggataaatatccggtggatatcaggtactcactcaaccttgactgtaccgtaacccaggatggtttccctcccagaagcctgagggagatgcttatcagaagattccgcctctccgctcgaaaatctctccttttccgggcagacttgacagaaatggaggcagaggaaccctacaccgttatgtggaaggtactgaacgtgggtgacgaagcacgcagaagaaatatgatccggggacaaatcgtttcggacggcggctactgtacgaagaaagaaactaccgacttccgcggagatcacatggtagaatgctatgtgataaaaaatgaggttgtggttgcccgggcccagattgaagttcccataagctgaggtttttatgacgcaatcagagatgctgaaattaatcgcccgacatggttataacgttggatttggcgctaagaaaaactttgccacctatgatctgatttgtaaggcatccggttggattagctttatttctcttgctgtcggtgtgttcgccctttttattcctgagctggccacaaacgtcatttccgcgatattaattatatttggtgttgctacaatgtacattcagttttatgactcggaaaagcagagttatgaaagtgcggggattgagcagaccaaaatttttaatgaacttgaagtcatctaccgcaacgtaaaaagcgatgcaaactttgactatcagcgtacacaacaatccatcgacgctatcatgtcccggttttacagcacggtcatcagcaaacagatcttcggaagtaactggtacgcacattataaattttactgtgaatttgaaaaagcatgggttgaagaagagctgaacctgacactgaaggacaaaatcccgctttcgctctgctttctcgccagtctggcgatcatttttactatagctgtcatctggaaaacgccctgatgctgcagccaatgaaaaattcagcaagctgactgtcaaatatgcgatgtatagccggtatcaccatccagtgtacgttctataagggggggcgcttggaaaacgggtagagtcaagatgtggcgcggtaattttacaggtcaggcatatctgttgccgcctctttcgattggcggtgccttactgtcctgaccataaatcctgtttccacaccccgctcatcgaagcggacatgcgcttctaacacatccggctctcggacagaatcatgccttcgcccacggaaacctctgcgggagcttcggtgcatattttcatggaaggggatcacccaataacttccatcgagatcgggtcataacggccaatccgtgatcgaatagagcggaatacgcactctgacgaactgcttacatttaaactaattacaaactatataaatccgccttactcattcacagggtagatatattcttacttttaattttatgtgtaattaactgatgacgaaaaatgaattgaactgtaaatgcatatctaagtttttcattcttatgatgtacataataccttaaaattatcaactagctgagcattaacctccatctgactaatcccccataatgcggctaactgtttctctgcaatcccactatcccatggcattagtgggtcattacgaaacttagcaaatggcccatctgtttctgtaagaatgcgtgatttgggtattttcaaaactaaggccttaccctttattgtatcgagcatagcaggccccactgagaaccagcatcctaaatcaattgccctttcaagctgcttaggtgttccagtgaaccaatgcaatattgccaccccatcgatattttcaatctcatcaagcaccgctgatgcacttccccgactatggatagtcataatcttgccaccagcccgatttacactgttgagaatgtgtcggaacactttcaattgaatatcccaatgttctttaaatccctgtccaccatcaagccctatttcccctacatacttagtttccgaaagcaatgaatcaaacaggtctaactcatgcgatctttgatgcgcgatttgaggatgtagcccaagagcagttcggattcgttgactttctttagccaataaagaagtaccatgccatgctttaggtgttgttgtcaccgacagaatataagtccctcgacgcttactttcttcagccacgaggtctggccgaggatataagtctagatgacagtgcatatcgatgctcatactatgttctcactcagtaaatagctttcaacctcatctaggccatccttaaatacttgcttgtaattatcaaattctgccgtaggcaaagggccacttttggcaatccatgtacctattttcaaagtcgatttctgcgtgatcgcaatcctaagggcgatcaggtcgtccctgcgatctatttcattcattactttagctaaggactggaaaatatattcaacatctctactaattccccctgcatgaagtgatgctcgtcgaatgatacacggtatacataccccacattgctgccccattcgtttccaatgactgcaggatactgtactttccacaattttagataagagctgcttatttgaacattcggagatcatttttccttttgtcttaaactgatatggattgattatttgacaagaaataccgagcgcatcaaagatcttttgtatgctcgtaataaaatgtggatgtgttgttcgtgtgctcagcgaacctatccgccgtggagtaagtggtgcatttaatgagataaatccattttcaggtacgaacaaatcaatcttttcttgttgagatatctcttgtacggcacaagcacctacggccgcaaaggcaagaaaattgaggctacgagttcgcatcgtaatatcagtcacgccttgataaatgtgtgggtcagcattaatctcaaagcgcgaaaattggccacttaatttttcagcgatctgatcttgacgagacttgtcccccttataagcatgactaaccaaaagtggagcgcgccctgcagccagaagatctattgcaccaatagctgaatccagacctcctgaaaataagctgacacagtcaagcccttttagcttaatcagacgatgccttgaatgctggctataaggctctggcggtgcataaccatcgtcacaaaattcgaaatcccagatgtctccactaagaaaatgcaaagcactctcaagttctttctttagactaatccatctggatggttcatgaagggggagtcgtaacgacaattggcgggtccaaccatcctcggaactttcacgctgaacgaaagtatctgctgcagttactgctaatgcaacactcagaaaatccatgaccttagctggaagctgtactcccaaacgtctgatccgatcaatcgcaggattcccgataacagatatatctccgcgcctctgaccacttaatccatatagctgaacaggtaacactttctcacttgctggcggcaaatggtgatgtttatgatggaaaactaattgtgtcactggtatgcctcccattcttgccaggcctcaataatggcctgacgttcaatttttaccatttggtttcgtgtgaacgatcttatgttaccggcaagttttggtgccatatgtttatcaacaacaactttaatcaattcccggagttcaatttctgcatgaattgcctttgaaggtgtatctgctttgttccatgccctattagaatccattaccatctgaaggaaaatactttccgctagataaccaatcattgtgtcaacaatcacaccatcagttattttttgaggatcgaaaatttctacgccatcaagagcctccactaaagcatggttcatggccgcacagatcttttctgagtcaccatcctgtgatgttaaagcttgagcaatagttgatattgctatttcgcatggaaggcctgccaaactgcccaaatcgatgcttggttctccgggagccgaaggcattcccactaaagccccaaataattcggccccagcttgcgtgacactccctaatcgccgagcagcgttactgctccctccggaggcttttcgcgcgtagtgccctatggcttttctgaaatctgctcgatttccatttgataccgcatttcccaacgattctcgaaatggcgcaaacctcctttcttgcggcgagggtaacggttgctgtggctgatcatcagcccatggtggaaccagcggagagccacctcctggacctttacttgattgtgatgttcccattaagcgtccttattccattgttcatcttttaatgctgcagtcatccacgctggtcgtttcatccccaactgtaattcctgtagataacgaattaatatgctggctgcatctgttgagtagcgggccaacagacatgcgccggaaaagcctctgggcttacgatcccaatctgatacctgccgtaactggttaattaaaccttccattacaggtatttgctcctcacgaggaagtgctttcaaaaggttttctgctgtaggagaactagtgtttttcaattcaattagtgcatttagtacttcccgtccagatggcgataaaccaaccacatatgcacctattggcatagtttctcgggacagatatatggcggcccttaagtcaatcccaccaagacgaggttcaagttgggcccattgactgatgaaagatttagtcgttggactatcagtccatgtctttggtgcatcagtaggtatttgaccgccattatcgtcaagctgtttaagtatctggggaacaccttgttcaatatccacgagatgatataaatcagcggtgccatccactccaacacagcgttcaaaaattactagcttagtaataattgcttcatccaaaggcattgctcgtcgcttcgcaatttgagatcgcattttcacaacattcaacaagcgtttaacgatcctgggattaccatgaataattggagagttggctaaaatgggagcaatacggtcagcacgcgcaaacgccagcgcgaggttgctatcatccgcttcaccagtcatttttaaggcctcctgacgtgagattggttcatctttccaggattgctgtaacgccttctctaagccctcacggagcatagttattttttcgccttctaagccatgttcaatggcataaagcatgaacagatacgaacggatctcacggaccccagccttaggcacccgaataggaacctggattagcttatccagataatctatttgatggcgctgtgatgcccctttgaagtaatcagccacagaagagcgaatcatgtcctcatctgctgcaataataaaggctgtattagtcaagaaaaggaatagcctgatagcttcaagtgtatggatagcattggcagggagacagcggtctaggttatctattaccacaatgagtggctttccaagttcttctagaatttccccatattccttacgaaaggcatcaatctgctgaggggggcttttttttgtttgtggtttaatcaaaccacaagcagtttctttaccttctttagctatattgcctaaagcctcatactcttcctggctctggatgccatcggtgatatttcttaatgcaccaatccccctagaaagcaaaccgccagcaggtaatcctgccattaaagctgtaccctcagctagtaatcccatagctctaaaaccatcaactcgactaaggagtctcttagtttttgatataagggtagaattaccttcagcagcttttgtcaattctgtagcgatgacttcaagaagtgcggcacgggtgtcgtcgtacccctgatagagccaagagtcaaaattgataacaatccaatctttgtcgtcttgctcaagtttttgctctatcagttttaacagagaggatttacctgccccccagtttccaaaaattccgatagatactggtaacatatctttcgtggtaagtacatccacggctaactgagatacttcaccaaaatttaggtagtcttctgatgactctttgtctgaccacatttttatatcctttacatcaccaatttttacgtcattgagtaaactacaagtttgataaaaccaactctgttcaggtgggcaaattcagtgtaccacttcaccaataatccaatatgatgactgctatagatctattttttaaagaatgaaataagctttcttatcccagtccatattttcctatcagaatccgaagggttaaattcgctcttgtcaaaatcagcaacctcagcaacctcagcaacctcagcaacctcagcaacctcagcaacctcagcaacctcagcaacctcagcaacctcagcaacctcagcaacctcagcaacctcagcaacctcagcaacctcagcaacctcagcaacctcagcaacctcagcaacctcagcaacctcagcaacctcagcaacctcagcaacctcagcaacctcagcaacctcagcaaggtttattctattttgatgatctgtcaaatgttctttgttaatttcatctctaattagctgttctttttctatgctgtagtttttgtcattataagtcacatcaaaatcatctaagaaaacgatataaatcaatttaaaacaactagtcttaaataaaaaactatcgcactcatcaggaaaaccaaaaaagaaaatattaagatatttggttgctttgcgcttgtcttttagtccattataatacttatttgcttctgctctttgtttttcatactcactacagaaaaaactctttttactttcatcccattctgaagcatcaatttcaagtttatatgcttgtttggcacctttctttctggctaaaaaagtaaggtaatatctattcgaatttatctccagccgtatattagattgaattttaccaaaataaattgctggcttattatatctaattccttctttatagatgattagttgaaaagtatctttataagtayctaactmcataagggggaattgataatggttcatagagattatctccattaatgnagtagwctactaccggnggggatgctkgaagatgacacagggtgtactttacctcccaaatctttttcatcatttcgcgtctgtttgataattcttctgccagaagagtcgtaatttctttcagacacatcaagtttcagaagagatatagctaatgccggtggtgaattatgctttttattattctttgagttacacttatttttactcttaggatcatgaatcttacatcccggcctatgagtctctttatatcgaaagtatgattgatttaaatttatttctttgaagctacatggagtagcgggtatcctacatttgtcatacgggcattcaaaagtggttgttcgtatataaagatcatccatttcccgaagatcatgaccatgaacaatttcaccactaacagaatctcttgctattgtcacacaatctcctttgataaaaattaatagattctaatttcacaccaaggctaatttaaataaaggctatttaagagaaaaacaagtcagcctgacagacatatcccctcccatggcaatatgccgctatttcgcgttttttttcatgccataatgcgtttcaaggtagcgaatatcttcgattgcccatggtgtgcgcattcttttgggtttattttccattaccatgttttatcagccatcatggctgcctctccggtttgccagcgtgttccacctgataacgattaatcagctgattcagtaccatttcagcctgtttttgctgctgttcactgccattctggttacgggcttcatcatagcgacgtaactgctcttccgccgggatatgccggttaaaagcctgcatgatgccaaacacctccgttctcagttcactgaccgtcatgtattttccccgctgttcatccagacggttcaggcgttcagccagctgctgtaagcgggtcatgccttcattccagcccgtcatcgcctcttccgggagcgcacgactccttacgctcttctgccagttatccaccatttcctgaacatggggattgtcggggaaaagtaccatcagttgctgcagcaactgcgcactgcgctgcaggttatatgccgggggtaattctgtcagtcgcgttatctgctgaccggaaagggttaaccatgatcgaccagacggttctgcaatgtactcatcagcagattaattcctttcgcccccagacagtgcccgaccgccccgttggcgattttttgtaaaggcagccagtgtggtaacgcatcagccccctccagttccgtctgtttaatctgaaaacagggcgtttcaacaggaaaattaatcttacgtgcaaaagagccaggtgcagaaaggcgaacatcaggggctgaaggcatcagttgttgctcaagggcttcctgacgctgctgctgaatgataaatgcttcatctccgctacgccggacatccgctgcctgaagagataaaggcgataataaagcagacatcagtgtcagtgacagcaaggacggacagcgccggaatacgctttgttcctcagccctcacgttcctgcaacataattttccagtcaaacgaaaaaccttttattcatgccataccaacaattaccagcctcctgacgatacctcccaccattttttgcaatggcacgctaccgcctttccggtatttacccacatcaaccggtaccagaatgctgagtaataaatctgccaatttttagctgacttaattttgatcattatagaataatgatctgaactacagcaatatggcagatttatcggtcaatataatacaaatgaacagttctttattctgactaatatcgcaaaaacagcgcattacaaaatttataaccataattaatggaaaagtgcagaaaattattccactgaatgcttttaatacaagttggttagcttaaaaaatagcratttttgatttcangtcaytgaaaattgcaatgcgtgacgrttcaacagcatttaagtgagtttcaggatatgggaaggacatgaaaagaggagcgcaataaaatacacaggaagaaggggaaaatgtttcgtaaaaacagaaaattaacagccgcacatcaggaaactgcagtctcctgattcagtgctaccacatgaaaatttagttaacctgttaccgtactaaaatttatgtcagaagatgttccattaccgaaagtcaatcagcgatacaaagacgatcatggagcactggccaccgtaaccagcgtcgaagaaacccgagtggtttttatgcgggagggttatccgcatccctgtatgcgaccgatgtacaactttctgggaaaattcaaacccgacccccgggaagaaacagaataaaacgaaatccctgccggcaatcacactgcctgatggcagcataatccacttattaatttctcatccccggagacaagccctgaaaaccactccgggtgtycattgtatgccgtgttcagcgcatcccaggaaacgttgatataaaagctgtcctgcaatttgcggggtaaccacctntaccacccggttccggttatacgccagtccggcataacctctctctgccagccactcattcagttcatgttccagagacagattgataatatcgtaatcggaccttgccattcccgtttccttagcacatgttttcaggcacggggataaagtataaagaatgtcgtactgctgctgccagagcaatattccccctgatggttgtatcagagatggtatgccggtattttgcgggttgttcccgtcaggttatcgtgcacctccacggtcgttgtcaccaccggcattccgctctgtcttagtctcaggacatcagccgcaatacgctgactgccagaccagaacaggccgtccagtgcggtcaccagtaaccccgcctccagcgcatacttcagccgttcacggggcgctttcacttcccgggcaacctgctgatatggcaatgatgtgttttcattcccaaccacgcgacgaatacggtgagacagatgataccggtatgtatccggcacactggaaagactggccttcaggctgtacacgcagccaaagcgtttatcgttgaacaccacatttttctggctgatgtcccattcttcacgcagcacagcaatcagttgtggtgtccgggtaagcagaaaggcaattcaaaacaggtgacgtaatccacattcagcagggcaatacgcggccatttttctgatccatttacaatcggatgtgggcgaacattattatcattatctgaaaatctccccctatggcatgtttgccatggcggagagtcattgaagcctttatgaggggtgaatacattcctgaagcagtgcagtggcaaaaaaacaccccgcttttattcattctctgacaataaatattgagtttgactgtatcagattttaggtatttcctagaaaaggacttttttgctcaaggcaaaacaataccgcaaaataatccttcacctgcacaaacatcctcagtccattaaaaaaatcgccatgttaggttaacgacatcaaatttggtcgtttaccatgattaaggtagttacacatggcccgctattatttttcgtgccccaaaatttattttggtgaagaggcaataacctctctatgccaatttaataataaacgagtcggtattgtcaccgatgattttatgatgtcatcaggtaaaactcgttatttaataagccatatgcctgaggcatcggtatgcattttcggcgaggttactccggatccagatattgatattctgacttccggcgcggcgcgttttaaagcctttaagcccgacgttattatcgccctcggcggcggctcgtcgctggacgctgcgaaaggaattaaagtcacattggaagagtattttggagatcatcaaatcgatctcattgctattcccacaaccagcggatccggctctgaagtgacgtcctacgcgatcatctctgatccgcaaaatggccgcaaatatccgttgatctccgggcaactggtgccggaaatcgccattctcgatcctaacctagtgttaaccgcgccgcgtcatgtcgcggtagataccggcatggacgtgctgacccatgccattgaagcctttgtctctactggctcaaatgactttagcgatgcgctggcggaaaaagccatcgcgttgacctggcgctatctgccgcaggtgtttaacgacgaaaaagacattgcggcgcgcacccacatgcacaatgcctcctgtatggcaggcatggcatttaactccgccgggctggggttggttcacggcatggcacacgccatcggcgggatgctgcatattcctcatggcaaaattaacgccatgctgctgccgattgtcatcgacttcaacagcaaacgggccagcactgaaacccgcgatcgctatcaccgttgcgcgcaaatcataggcattgaccatgcggtaccggagcaggccatcgcgctgatgactcaggagatccgccagatcaatcgccatttctgcatccccgtcactctcagcgaactgggcatcgaccgtgcaaaaatcatcgagttgcgcagcgcactggtgaattcgacgctggccgacggttgtaccgcgtcgaacccgcggcaggtgacgacgcatgatgtcgaagggttgatcgacctgattaccggctagctggataactttgttcagcctccgtgaagcagtcaaaaaagtcctgctgataaacaaaaaccgggcgtcgttactccctatcctgatcgttagacgcccattacccataagataacccaataatcaggtcgtacccattatgaattacaccgaacaacaagccgagtggattacccaacaaattttgcaggaacttgccaccagtaaaaaaacggcagcgcctgctgccgcgcccgtcgcgctgaatattccggtgggcgtgtccaaccgccatgttcatctgtgccgtgaagatatggacattctgtttggctacggctctacgctaacccgttctaaagcgttgaaacagcccggtcagtatgccgccgaagagatggtgacgctgcgcgggccaaaaggcgagctcaacaaagtgcgcgtgttagggccactgcgtaatgccacgcaggtggaaatctctgtggccgacggctttgcgctgggcactaaagctccggtgcgcatgtcgggggatctgctggattcgccgggcattgaaatcatcggtccgaaagggcgggtggtgaaacacaacggcatgattgtcgcctggcgccatatccatatctcgcccgaagaagccgaactgcacggcctgcatgacggaatggaaatcgatgtgcaaacaaacggtccgcgcggtggtgtgctcagccatgtagtggtacgcgtcacggcggatgcagtgctggaactgcatattgatatggaagaagctaacggcgtcggtctgcgtaatggcgataccgttcgcggcataaaacaggctgcgcgccatggctaacagccccgaaaactgccgatttcacgaattggccgcgctgattgacagcggcgaatgtcggccctactccggcgcgttgaaggtgggggggatctcggtaccgccaatatcgcaatcgtggtgctggatgaagataaccagccggtggcaggggtaatgtatccctccaatgtggtgaaagacggcgtggtggtggattacctgaccgccagccgggtagtagcacgtctcaaacaaattcttgaacagaaacagggctgcacgctggagcgcgcggcgatcgcagtcccaccggggatctctgaaggcaacacaaaagtgatcgtcaacgtagtggagttggcgggttttatcgtgacccaagtactagatgaaccggtagccgctgccagcgcgctgaatattaaaaacggggcggtggtggatgtcggaggaggcaccaccggcatgagcattttgaaaagcggtaaagtgacgttcagtgccgatgagcccaccggtggaagccatatgaagttggtgatcgctggcgcgctgggcttgccttatgccgaggcggaagaaatgaaaaaaaacgggcaggaagcgcaggtctttaccctggtgctaccggtggcccagaaaatggccagcttggtgtcgggatggttcgctacccagcaggtaaaaaatatttatttggtaggtggcgcgagcagcttcagccagtttgccaacgtgttcagtaaacaaaccggtaaaaatgtgattccttcggcagagccactattggtcacaccattaggcatcgccatgaatgcggaccaggggtaaatcaatggacaatcaaaccttatcgcaactgctggaccgggtcatcgctgaagtgttggcacaatccgtcgcgcagaaaaatgtctgcgtagtggtgactggtgaggatatctcctcgctgccggaaacgctgaactgccttgaggcgcttgagctggcgggttatcagttgtgggtaaatttttctcacagcgccagccagtcggcgctgaaatctgtctgcatggatgcgctaattcagcgtggttctcgtgctggatttgacagatcgccgcctcactatgaggtgctctatctgcctgcgctctctgtcaacagcatgagcaaaattgcgctgggcattcgcgataatctggcctgtgaaactgtatttcaggcgttacagcaccgtaaacagattatcgccacgctgcatcaacaatgcgtcgatagcgaattaccgatgccactgctgtcttgtctggaaggttacgctcaggtcctagagagctatggcattacgcttttcggtaaacgtgcagcccatgtcaagtcggtgcaaggaagccaatccaccctgacagtagccggtaaaaaacgtttaatcacccagagcgatatccgcctactgaccattggcacagtgctgcgcattgagagcgacacgctgattacccctgctgccagagatgaaatccagcggcgtaatctcactgttatccatggttaaccggaggaaatatgtacctcgctaaagttactggcgcattggtttccaccaccaaacacgcctcgctgaatggctcaaaactgctgatagtggcgcggctcgatgaaaactatcagccgactgtccatgcccaggtggcagttgatactgtcggcgcgggcaatggagagattgtgatcatcaccaccggcagttcggcgcgtatgagcaacaacaaagatcactcggtgattgacgctgccgtggtgggtatcgtcgactcgctcgaacttaacggttaatagcggcgcgtacgctgaggaatacttatgtctgcgaatgaggcttcactcgacaactggattaacgaggctattgccacgcagttaccggaactccggatgtcgctgagcctggaggacagtgaactgctggcaaagttggtccgggaaatggcacagtccagcaatgtatcgatcgtttttagcctagtggatgcctgcggtcagcagcgttttttcttcagcatggataacgccctgctggtcagccataccttggcaccacaaaaggcctggaccgcggtagctctcaaaatgccaactcacgaactggcaacgctggtacagccgggtggtgatttgtacggccttgagaaagaaaaagatatctgctgcttcggcggtggttttccctgctggtcgggcaggcgcttactaggcggcatcggcatcagcggcggcagtgttgaggaagatatgctcatcgcccgccaggcgatggcgcagtttagcgttctgcgttatcccctcacaacaacccgttaattttttgcagtccatttcagggggcatcatgtctttagcttgtgtattagtgattaattgtggttcctcatcaatgaaattctccgtcattcctcaggatgcagatcagccgttgctgtcgggcctagcggaacgactgggtattgatcatgctgtcataacgtttaaagaccgagacggccataaatccactgtcgcgctggatgacgccagccatcagcatgcgctcaaagtgctcttcgcgaagctcgacgaacagcaactgttggaagccatcaacgccgttgggcaccgcgtggctcatggcggcagcgacttcaaaagatcagtactggttaccgatgatgtgatcgaaaaagtccgcgcgctgtcggtgctggcccctttgcataaccctgccaacctgattggtattgaagcggctcgggctctgttgcccgcgttgccgcatattgcggtgttcgatactgcgttccaccagaccttgtctccggctgcttacacctatgcgatcccgctggagttccagcaagattatatggtgcgacgttacggctttcacggaacatctcaccgctatattgccgccgaggcgcttgcatcactagatctcgacccggcggatcatggcatcgtgattgcccacttgggcaacggttcatcgctatgtgcggtgcaaaacggcacgagcattgacacctcaatgggtatgaccccgctggaagggctggtaatgggcacgcgctgcggggatcttgattttggtgtcgtcgcatatctggcgaaacgcacaggtcaaacgttcgacacgctgtacaaaatgctcaataaccagtccggcctaatggggatttccggcttatccagcgattgccgcacccttcagcaggcgcgtgatgagggccacgaacgggcagcgttagccatcgacgtgttagtacatcgtctcgcacgacatatcggcggccacgtgacctcgcttaaacgcttcgatgcgctgattttcaccggtggaattggcgaaaactcggcgttaattcgagaacttaccgtgcaacgccttcaggcgctgggattggaactggataaagaacgtaaccagcagctgttcggcggacgtagcggactgatttctaaaaccgacaccacgaagattgcggtcatcccaaccaatgaagaaaaaatgattgctatagatgcagcggagattgcccgcacggcataactaattggcaaaaatacgacagttttaacagtaattatgatcgctattcagagcggggctattttgcaaggaagtttaaacgcagatcttttattacaaacctcgggtggattttattgtcaattgcgggaatgcaaaagcaagatagtcccactgacgcgcaaaacattttgtctgaataaccttagcattatgataattaaataattaatgcacatgggtgaatccgtagattgctattcctctgtgcacgttttctttctatcggaaatattgaggtcgttatgcaacaagaagcattaggaatggttgaaacgaaaggtctggtttctgcaattgaagctgcagataccatggtgaaatctgccaacgtgaccctagtgggttatgaaaaaatcggctccggcttggtgactgtgatggttcgcggcgactgttggcgcagtgaaagccgcgacagatgcgggctccgctgctgcgagtaaagtgggagaactggtctcctgtacatgttattccacagcccacacattgaggtggaaaaaattctaccgaaggctatcggttaataacaataaaggatactgatcatgagagataatcttgttgagcagattatatctgacgtaatgaataaacaaaccgatatctcaccggaagctaaaacagcagcaaatttcgctggttgcggtattacggaatttngtcggcactgcgttgggccacactatcggcctagtgattgccaatgttgataatcaattgcatgaagtcatgaatatcgacaagaaatatcgctctatcggtattcttggcgcacgtactggcgcaggcccgcaaatttttgcggctgacgaagcgattaaagcaaccaacagcgaaattatttctattgagctggcccgcgataccgaaggaggtggcggacacggttgcttaattatttttggtgcgtctgatgtttccgacgtcaggcgtgcggttgaagtggcgctgtctgaaattgaacgcaccatgggtgacgtttatggctcgtcagccggacatcttgaattccagtacaccgctcgtgccagctacgcgctgaataaagcgctgggtgcgccgattggtaaatccttcgggatgacctgtgcctcgcctgcggcgattggcctagtgattgccgacgctgcggcgaaatccgccgtgattgacccggtgggttatgccagcccgtcgcaaggcaccagctttagtaacgaagtgatcttcaccttctccggtgattccggtgcagtacgtcaggcggtgattgccgcgcgtgaagtcggtctacaactgctctccacgttagatccggtggaaattaaatccaccacgacgccatatatctaagcatctgatgacgatgcacgcggcgcggtcggtagatgaagagtagtaaggaatttaaagatgaatgatattgaaatcgctcaggctgtctcgaccatcctgagcaaattcaccaaagcaacaccggatgaagctcccgccacgtcagaagcagcgcgggtcgacgggttggatgaaattgtcgctaaggcgttggcgcagcactcttccgtgcgcgacgccagtgcgatctctcaggtagcgaaggtagcgaatgctagcactggagcattcgataccatggatgaggcgatttccgccgccgtcttggcacaggtgcagtatcgccactgttctatgcaagaccgcgcctcgtttatcaatggcattcgcgatgtcttcctgcaggaagatgtgctgtgtgccctttcccgtatggcggtggaagagaccggcatggggaattacgaggacaaactgatcaaaaaccgcgtcgcagcgctgaaaacgccaggtatcgaagatctgaccaccagcgcggtttccggagacgggggtttaacgttgatcgaatactctgcgttcggagtgattggttcgattacaccaacgactaacccgaccgaaaccattatcaacaacagcataggcatgctggcggcaggcaacactgtggtgttcagtccacatccgcgctcgcgcaaagtgtcgctgtacgcggttgagctgatcaacaacaagcttgcccagttgggcgcaccggcgaacatggtggtaacggtgaccaaaccgtccatcgacaataccaacgtcctgatcaacgacccacgtatcaacatgctggtagcgactggcggtccagccatcgtgaaaaccgtgatgtcatcaggtaaaaaagcgattggtgcaggcgcaggtaacccgccagctgtggtagatgaaacggcggatatcgaaaaagcagcccgcgacatcattaagggctgtagcttcgacaacaacctgccgtgcgtggcggaaaaagaggtgattgttgtgaaccaggtagcggactatctgattcactgcatgaagaaaagcggtgcctatctgttgtgcgataagaagttaagtcaacaactgcaatcgttggtgcttaatgaaaaaggcactgggccgaataccgcctttgtcggcaaagatgcgcgctatatcctgcaacaactgggaatccaggttggcgacgatatcaaagttatcttaattgaggctgagaaaacacatccgtttgtggtgcatgagctgatgatgccggtcctgccggtggtgcgcgtagacaatgttgatgaagccattgagctggcggtgaaagtggagcacggcaatcgtcataccgcggttatgcactccaccaacgtcgaaaagctgaccaaaatggcgcgcctgatccagaccaccatctttgttaaaaatggtccctcttatgcagggcwggggsysagcggtgaagggcatgccacctttacgattgccggaccgaccggcgagggacttacgtcagcgcgttcgtttgcacgccgtcgtcgctgtgtaatggttgaagcgctgaatattcgctaactatcgcgaagggtgacttaaagatgaaaaaacgaatcataaacgcaccgaccccggatattttggctatgttgaaacggcgtatgcccggggagtttcgttcgcgtttggatttgattcgcatcgaccgccattggtttgttaatactgccggttccggatctctatttttatgccgacgtagccagtaaaagcgccaatgtggtggtatcagaaatctttggcagttgccctcagcatatcaccacattggccatttttggcgaagtcgcggcggtgcatgaagccatgcgaatcattgaggaagacgataaccagttttgagagtccgcttatgaagaagatattacttatcacaggcgatttctctgaagactatgaagtcatggtgccatggcaggcattaaacatgttaggtttcagagtggatgtagtgtgtccgggaaaacgtaccggcgagtttattaaaaccgcgattcatgattttgaaggtgatcagacctacaccgaaaaacccggacatctttttagattaactgcatcatttgatgacataaggttacaggaatatagtggtgtttatatttctggtgggcgttcatcggaatacttgcgattaaataagtcagtattggatatcgtgcattacgcgatgaatttaacattacctgttgctgcaatttgtcatggcccacaaattctggccgctgctggggtattaaaaggccggaaactgacgggatattttacggtaaaaccggaagtggaaatggcgggtggccagtgggtcactgccgcagatgatgaagccattgtggatggtaatttaataaccgcgactacctggatggggcatccagcaatattacgtcactttattactcaaatgggcactagcattattcattaataccctggcatctccgcaaggttaacaaaatatattcgggagttttatatgttagagaaaggcttttctaatccgacagaccgtgttgtaagactgagaaatatgatcctgacggcgaagccgtatgtggaatcagaacgcgcggtgttagcaaccgaagcatataaagaaacagaacaactgcccgcgattatgcgtcgtgctaaagtggtggaaaaaatctttaaccaattaccggtaacaattcgcccagacgaattaatcgttggagcggtaactattaatcctcgctcaactgaaatctgccctgagttctcctacgactgggtggaaaaagagtttgagactatggaacaccgtattgccgacccgtttgttatcccgaaaaagactgctcaggagcttcatgaagcatttaaatactggccgggtaaaactaccagtgctctggcggcatcttacatgtcagaaggcactaaagagagtatggcgagcggtgtattcactgttggtaactacttcttcgggggcgtcggtcatgtcagtgttgactacggtaaagtgctgaaaattggtttccgtggtatcattaatgaagttagccgtgccttggaatcattagatcgcactgaaccaggatatataaagaaagaacagttctataatgcggtgctgatcagttataacgcagcgatccgtttcgcccatcgttacgctgaagaagcatcccgtctggcgcagcaggagagcaatccgacccgtaaacgcgaactggagcagattgctcaaaactgtactcgcgtgccggaatacggtgctaccacattctgggaagcatgccagacattctggtttattcagagcatgttacagattgaatccagcggtcattctatctccccggggcgtttcgaccagtatatgtacccgtatctggagtcggacaaatctatctcgcgtgaattcgcgcaggaactggtggattgctgctggatcaagcttaacgacattaacaaaacgcgtgacgaagtctctgcccaggcgtttgccggttacgcagtgttccagaacctgtgctgtggcggccagacagaagacggtcgcgacgcaactaacgatctgagctacatgtgtatggaagcgactgcccatgtgcgtctgccgcagccatccttctcaatccgcgtatggcagggtactccggatgagtttctgtatcgcgcttgcgagctggtgcgtatgggcctgggcgttccggcaatgtacaacgatgaagtaatcatcccggcgctgcagaaccgtggcatttcgctgcgtgatgcgcgtgattactgtatcatcggctgcgtagagccgcaggcaccgcatcgcaccgagggctggcatgacgccgcgttctttaacgttgcaaaagtgctggaaatcaccctgaacaacggtcgcgttggcaataaacagctaggcccagtgactggcgaactgactcagttcaccagcatggaggacttctacaccgcgttccagaaacagatggcgcacttcgttcatcaactggttgaagcctgtaacagcgtggatattgcccacggcgaacgctgcccgctgccgttcctatcagcactggtcgacgactgtatcggccgtggtaaatctctccaggaaggcggggcgatttacaactttactgggccgcaagcattcggcgtagccgataccggcgactccgtctatgccatccagaaacaggtattcgaagatcgtaaactgtctttgagcgaactgaaaagcgcactggacgccaacttcggttatccggtgggtgcgaacccgcacactccagcggcgaaatcctcgctcaacgagcaggatatctacgatgtggtgaaacgcatcattgaacagcatggcgcgctggatccggcagcgattaaaaacgaagtttatcgccagctgacttccggcagtgcagcaccggtgcaatccggcactatgtcccgtcacgaggagatccgtcgtattctggaaaacacaccgtgcttcggtaacgacatcgatgacgtggatttagtagcgcgtaaatgtgcgctgatctactgccaggaagttgagaaatataccaacccgcgcggtggccagttccaggctggtatctatccggtgtctgcgaacgtgctgtttggtaaagacgttgccgcactgccggatggccgtctggcgaaagagccgttggcggatggcgtatctccacgtcagggtaaagacacccttggcccaaccgccgcagccaactcagttgccaaactggatcactttatcgcctccaacggtacgctctataatcagaaattcctgccgtcttctttggctggcgagaacggtctgcgcaacttcagcggcctgatacgtcactacttcgataagaaagggatgcacgttcaatttaacgttatcgaccgcaacactttgatcgaagcccagaaaaatcctgagcaacatcaggatctggtggtacgcgttgcgggctatagcgcccagtgggtagttttagcgaaagaagttcaggacgacataatcagccgtactgagcaacaactgtcgtaaataccagacgggctatgtatcaatatatagcccgttactttctccacgacttctggttgttacttttatctgaaaaggtaattcatctggtaaatatagagtgatgttatgaataaagttgagtacgaaaccgaaggcgtcatatttaatattcaacgctattctttgcatgatggtccaggcattcgaaccattcctttttttaaaggctgcccgctgtcctgcaaatggtgtagtaatcctgaatcacaacgtcacagcccagagttattatttaaaaagaatgattgcatccgctgtggaaaatgtattgatgcttgcccacaacaggctctttccactactaatgcctggtttatcaatcgcgaccgctgtattcagtgtgggaaatgtactgagatttgccctacccgtgcgctggaaatgaagggcaagcgtatgtcggtaacggcagtgatgcgcgaactggaaaaagaagagaatttataccggcgttcaggcggcgggattaccctgtccggtggtgaaccgctggcgcagccggaatttgcccgcgagctgcttaaagcctgtaaagccaaaggctggcacaccgctattgaaacaagcggcttcaccaccaaagcggtgattgatgaggtatttccctatgtcgatcttgctctgaccgatattaaagccatcgatccggaaatccatgagcgcaacaccggcgtgaataacagagtgattctggagaatctgctgcgcatctcctttttaaccaaagtggttgtgcgtattcctgtgatcccaggagtgaatgacaattcgcaggaaatccataatattgcggagttcgcccgcctgatgcagaacgtcgataccattcacttattgccttatcacagcttcggtgaaaataaatataatctgcttggtcgccagtatccgatgggcgatacaaaaagtatcgaagaatcccaaatggcagagttaaaagcaatggttgaatccttaggttttaactgccatatcggcggttaataaaagatgtaataagagtgcgaaaaaatgctgcgcttgtttatttgttacgcatgaatactatttcaattttaaaaatatagagcaatctgcattacttatattgtcatttgatttaattacagaggtaagctagatgaatagcttagatattgtagttgccttcggcggcggcatatttggtgcggctgttggcgcgctggcggcgtttgaattcgttgggcttctggttatcgccatgacggtagtgcaaattattaccggagcatcatcggactttattacttttccgtttggactgtttggcccgcacaccggcggctttgccgctggggttgcggcgacggcgtatgcagcgaagaaaggcaagctgggttccgggcgtgatatcactgccgggttgagcggtctggcggcttacgatgtgctgctggtaggcggggtttttggggcggttggttacatcatcgcctgggggttgaaccagattccggccttcccgtccggcaatgcttggaccgataccgtggcactaaccgtggtgatttctggcgtggtctcgcgtctggttttcggtaaaactggcctgtttggaaaaccggagcagggaattcgtcactgctatccgccgcaggataagtgctggataccttaccatagccgcattccgcagctttccgtgctgggcttgggtattggcttgatggcaggctttttaggcctgaagtttggcggcaacggcgcgctgctggcgtttggtatttccgcgttctcactgattttcctgcatttcaatactcaggtaccggtgtcacatcatatttcgctgcctgccgcgttggtagcggtgccatcaggtagcctgatttgggctgctatcgttggcataatttgcgcgatattgggtgaactgatgtcgcgtatcttcctgatccacggcgatacacatattgacccgccggcgatggtcatcaccattatgaccacgatgattaatctgttggcgaccattggattatttaccttggttcccctgttttaatcccgccataacaaaaagccagcagtgtctgcctgctggctttttgttatgtgcgccgtgactggcgctgttcttcaactgtggtggcagaagaacgactaagaggtgaaagtcctccacacacccggtgaggggaagtgttagcggaaggcaagggtgttcatcgcgaggtgaaatctgaaggaagctggatgcaaaatgctggcctgacgaacaggaagcggttaaggcggcgcagcagggtaaggtggcactaatcaccaaagcccgatactcacacggaacgctgtgacgtaaagccgacaggcataagcaggaaagtcgcgtgaattaccccgggagatctgtcgccctgccagtgtgctaccggcgccgtgaggcgccgggatggggcggcagaagtcagccgacgccgtagtagtgctgcaaaaccggcagcatgaagggccgaacatgattaactgtgattaggacatccgaacccgatgatgattaatgaagcacaagcgcaggcaactgcgaccagcggcagaggagacggacagtatccgtcagggctgcatgatggcgctgaaatcagcacggcggcgggtgggcaaacgaaagcggaagtgccgctgacgatggaagcggtgataacgagagaaaacctgatgctggcttatcagcgcgtggtggaaaacaaaggcacggcgggggtggataacctcagcgtggcggagttgaaaccgtggctgaagaagaactggcgcagcgtcaggcaggcattgattgacggaaactaccagccgcggcaatacgccggatggatatcccgaagcccggatggcggcgtgagaacctcaggcatcccgacggtggtggacaggcttatccagcaggcggtgcaacaggcacagcgttacatacggsgtggcaaacggtgggtggtggatatggatctggagaagttcttcgaccgggtggatcacagactcctgatgacgcgtctggccagacgrtkaaggacaggcgggtgctgtgactgatacgccgctacctgaaagcggaaatggttaaagacgggcaaagggagaaacggcaggcgggcatgctgcagggcggcccactgtcgccgttactgtcgaacatcctgctggatgaactggataaagaactggagcgtcgtggacacagcttctgccgctacgcagacgactgcaacatctacgtaagcagccggaaagcgggcgaccatctgctgaagaacatcagggcgttcgtggagaacaaactgaaggtgaatgagaagaagagcgcggtggcgcgcccgtgggatcggaagttcctcgggtacagtgtgacatggcacaaacaggcgaagctgaagatagccctgacgagcgtgaacaggctgaaggagaaagtccacagtctgacgacgggaaaccggagcaaatcagtgaaagcgacaatcaatgctctgacaccagtgctgtgtggatggataagctacttcaggctgacggaagtcagaggagtgctggaggagctggatggctggatcaaacggaaactgcgttgcttgttgtagcggcagtggaagagaccgctaacccgggcaaagaacctgcaaagagcaggactgagtaaggacagggcaatgatctctgcgtacaacaaccacgggccatggtggaactcagggtcaagccatatgaatcaggcgataaagaatacatggttcaggaggcagggtctgatatcactgctggaacagtagaggcagttccagagttaacatgaaccgccgtatgcggaaccgcacgtacggtggtgtgagaggacggcgggagtgatcccgcctcctactcgatcaattttaaaacacctcctatgtaggtggtgatcgttcatgtggggctttctgacagactgcctcgtcattccattcgtatcgccagtaactggcgtttgtattgtggcagttctggtatacgtttccctgtgtatctgcactggttcagcaaggtttgaaaaggagtatcccttgcaaataaccgaagcattactttcagagccggagctgtttttgttgctgtgatccatttcaattttttcgcgacaaattatttataaatatatgattatgtttttaaaaatgcaggctgaaagtatgaagaataaatacaaattaaatgagtttttggatgtaaaacgccttcagaccctgcaggacaacttttcaaaatcaatgatgatcgcgctcgtggttgtggatgagaatggtatcccggtcactaagcccagcggtttttcagacttctgcatgcgttcgcgtctcaacccgacactggcgcaccactgttatgaaagcgacaacgctggtggccgtgccgcgatgcacgctcgcaaaccggtggtttatcgctgccactgcggttttgtcgaattcgctgtcccaatcatgattaacgatcattatctcggtgcttttatttccggtcaggtaaaagtcgaagaagagaaagaacagagcatttcctatattctgaataataatgacgtctggaaagataatccttggttaattaatttgcaccagaatacacgtcgcatgccgtataagcgttttgagtctactgcctcgacgttactacacgtatcgtcttatctggtcgaacaagcgcacaccaataatatccaacgcgaacttcgtaaaaaggatcttgcactggctaatgagttaagaaaacgtgtagagatagaacgctcactacatgaagctgaatttaaagcgctctcttatcagataaatccacactttttatttaacgtattaaataccattggccggttagcttttcttgaagatgcacagcgtaccgaaacaatggtgcacgatttctctgacatgatgcgctatttgttacgtaaaaatagtcacggcctgattactctgcgtaatgaaataaattacgtcaacaactatatgtcgatccaaaaagtgcgtatgagagaccgtttcgattacctgtgcgatatcccggaaaaatatctggatgtagtctgcccgtttttgatcctgcaaccgctggtggaaaacttctttaactacgtagtggagccaagggatagcaatagtcatctgctgatccgtgccacggacgatggcctgaacgtgattattgaagtcactgacaatggcgacggcatcgcaccagataccattaatcgcattttatcaggcgaccaaaaattgcaaaaaggcagtattggcattaacaacataaaaaatagattgaagttgttatttggcgagagctatggcttggaaataatgagccctaacaaacccaggatgggtacaaccattaaacttcggttcccaatgcaggaagcctgatacaggaaaaggacatatgtttaccattgttatcgttgaagatgagcccatcgaattagaatccctgcggcagattatctcccagtgtgtggaaaacgctgcgatccatgaagcctcaaccggtaaaaaagcgattcacttaattgaccaactgagtcaaatcgatatgatcttagtggacattaatattccgttgccgaacggtaaacaggtgattgaatatctgaagaaaaaaaacagcgatactaaaatcatcgtaatcacggccaatgatgactttgatatagtacgcagcatgtacaaccttaaagtggatgattatctgctcaaaccagtgaaaaaatgtatcttgaccgacaccatcaaaaaaaccctagcattcgacgaaggagaaaatgaaaaatcccgcgccctaaaacagaaagtgttcgccatgatagacgattgcgattacacccagtggcacaactttatttttgacacgctcaacggtgcctgtccggtggatatgatagaagaggataagcgcaaagacgtgatcgattttctggaaatagttagccagtatatgaccgccaaaggggaaaagttaatgccgactaaccgtaaagtcgccgcgctgatcaaagacatcaaccagtatggcatgatggaaagccgctatttccgcatcatgatcagcctgctgaccattagcgaagagctgtttgattacgcattaaaaggctatacaggcaatatcgattttatcgaacgagcgaaattccatattgagaaaaatattctcagaaacttgacgctcgatgacgtggcagcaaaatcgtttgtcagtgcctgctatttgagccgtacctttaagaaaattaccgggttcgggttttcgaactatattgccacgcgtaaaattactatcgccaaatcgttattgcggttcagtgacttacaagtaaataccattgcgctggaactggcataccaggattcaaactatttttgccgcatcttcaaaaaagatactggcatgaccccctctgattatcgaaaagtcgtgtccccgggaattacacggtgatggcgtgattttgcattggcccgataatgaaagcaaaatagtccaacacgcccgcaagatagtttacgcccacttgtcaggttcctatcctaagataggaataaacttcccaaacaagtgggctcgctttgaacgattacctgtttacctccgaatccgttgccgaagggcatcccgataaaatggcggaccaaatttctgatgccattttggatgcgatactcctacaggacccgtggggtaaggttgcctgtgaatgcttggtgaaaactggtgccactattgttgccggagaaatatctacccatgccgccgtggatattgagaagattgtccgcaacaccataaaagagattggttacgaccattcgcgattggggtttgatggcaatacctgctgtgtattaaatatccttggcaaacagtccgccaatattgctgacggcattcgcggccactcgatggaagaactgggggcgggcgatcagggcatcaccttcggttacgcctgtgatgaaacgtcggaactgatgcccgccacgctggtatacgcccatcgtctgatggagcgccaggcgcagttgcgtaaatcccaacggttaccatttttactccctgatgccaaaagccaggttaccctgcgctatcaggataatcgtgttcattcagtagataccgttgtggtgtctacccaacacagccctgacgtttctctggacgcgctacgggaagcggtcatcgaagaaattgttaaacctgtgatgccttcgcactggctcacaccacaaacccgctttctggtgaaccctgcaggcagttttgtgattggcgggccggtgggtgactgcgggctaacggggcgtaaaattattgttgatacctatggcggcgcggcttgccatggcggcggcgcgttttcaggcaaagatccgtcgaaagtcgatcgttccgccgcctacgctgctcgctatgtggcgaaaaacatcgtcgccgctgggcttgcctcacgctgtgaagtccagttgggatgggccatcggcctgccccgccctgtttccgtcaggattaacaccttcggtacacaaacagtgtcatctgaagcgttgctgagaggcgttaacagccatttcgatcttagcgtgttcggcatcattactacgcttgatctgctggtcccccgctatcgtaaaacagcctgctatggtcactttggtcgcgacagctttccgtgggaagttacggacaaagcggcgctattatacgaagacgttggacgttaagccgacgacgcgcagcacagttgaatttattacaggagaaatttatgtctgggaaaagtttaggcttaatcgaaaccgtcgggatgtctgcggcggtagaagccgccgatgccgcaatgaaatccgctaacgttagtctggtaggctatgaattgacgaaaggcggcgggatggtgaccgtgaagctggaaggggaagtgggcgcaattaacgcggcggtagcggcagccatcagcgcggcaagccgggttggcgaggtgtatgcccataaggtgatcgcccgcaccgcgcagcatatcgagcagattattcactctaaagtgaccgccggcgtcgcagaacctcaacctgaagtgcctgctgcacaaccgacactgcaggctgaaaacgcgccttcacagacattcccggtggttaaccttgatacgtcaatcagcgcatcctgtatggatgtcactgatgaaacgctgaagtccgtggagcagcatcaaccggttaaaccctcaatagaaaacactaaacctacaaaatctgatgtaccgcaggaggcagcaaagaaaggtcctcgttccagcggcaagaaaaaataagtaaattgctatgacgctgccgcggtaacaatttctttatcgcggcatttttttgcttaacagataaagtaaaaaaccatctgcatagcgggcggctttgacacggccccctgaaagggggcttaaacactaccctttcaggcccagttgtatttgtctttcttcttcctcttttgctaccttgttcgaaaagggacgctcgtcctcgcccactgttctgtatgcatacctgctcccactgcaaattatattgctgggctatgttaacaagcctatatgctattaaaaactcatgagcaacatattgataatatcattcttatatatccacgcttaagtaaataacgcttacataactaactattccatctcacttcttccttagcgagttttcggtatgcaataggagctataccaaagcggcgagtaaatgcccttgtaaatgtctgctgaaaatcaaactgatatttaaaagtgatagtcgtgaccgattcagtagtagaacgtagttcttctgctgcatttattaatatacctaccaatagaaataccaatgatatgtttaaacaatctctgtaaataccattttgaatatccagctttttttgcctcaatatttattgagagttctacctcaagattttcatcaatccatttagcaagctcattgatatcagcgctgttttttatagtagcgttcatttttatcgatgcctgtgaaggttgattgggtcaactccagtactatgcaaccctctctgaaaagggatttattatcaggttgcagaatgcaacttcgcccccccccccgtaaacaaagaaaaaagcaggaacgccagagtctcactacgaatttccgaacatatttctctatataacttacctttttcgaaaatataacatagtaatttcacaaaattattgacatccaccattttttgtaagaaatttattcttatatcatccggacattcttcacaaaaaaacacaatataaattacattccgtaagtgtacattatattgtaatttaatcaggctacgtgataagcaacgatacatcgctttaaccggttcagaaactctcccatttttgatggctgtaagctcatcaaataatgatagtggtacccgctcgatgacttgtcgcagaagatcttttttttcgttgaaataccagtatatggccccccgagtacaacctgcgcgcgccgcaatcatctccagtgtcgtctttgaaaagcccgtctcacaaaagcagaactctgccacatccaggatttgtttgcgggtttcttccgctgcaaattttgtgtgccgcaccactgttgaaatctccattgacatcttatttcaggaaatatctctggggcatttagtaccaacccaacagccatttactcaggcgcagtatgttgtttactgcacctgaatatttactcatgcttatgattgctcagcttcagtcttatccgatgatttcttatttctgcggctgaagaacccggcaattaacatatagaagagaggaatataaaagattgccagtatcgtagcagtgatcatccctccaaccacaccagtaccgatggcatgtttacttccggaacttgctccagtcgagacagccagtgggataacccccattacaaatgccagcgaagtcataattatcggtcttaacctcactctcgccgcttcaacagcagcctctttaatgcttagtccttctttctcatgcaattcacgagcaaactccacgataagtatggcatttttcgcagacagccctattgttgttaataaaccgacctggaaaaagacatcgttaccaaggccgcgcaacaaagtagcacagacagcccccaggacaccaagcggaacaaccagcatgaccgagaaaggaatgctccagctttcatacagtgcagccagacacagaaagacgatcaacagtgaaagtgcatatagtgcaggagcctgagaacctgaaagtcgttcctcaaaagacaaacctgtccaggaaatatggaaaccttcgggaagtcttgccgcaatatcctcaattgctttcattgcatccccggaactgtatcctggtgccggttcccccaggatttcgacagcagagataccattatattgctccagttttggtgagccataaatccatttgcctgttgcaaaagaggcaaaggaaaccatgtcgccatcactgttacggacataccatttatcaaaatcctgcggtgatatacgtgagccgggttcgccctgaatatagacttttttcacccgtccacgatcgttaaaatcatttacatacatcgaaccccaggctgctgacattatgttgtcgacgtcgctcatgctcagtttaaacgcctgaactttctcgtcatcaatcagaatctggaactgaggctcatcgttcatgccgttaggacgaaccatgtttaacgctggacttttcgccgcttcagcaagaagctgatttcgggcctggatcattttttcatggctagctccgctacgatcctcgaggaacaggtcaaaccctgtagcattccccagttctgatacggcagggggcgctttaaaactagactagcccccagaatctccagacaaccaatatcacttaaataagtgatagtcttaatactagtttttagaccagtcattggagaacagatgattgatgtcttaggaccggagaaacgcagacggcgtactacacaggaaaagatcgctattgttcagcagagctttgaaccgggaatgacggtctcccttgttgcccggcaacacggtgtggcagccagccagttatttctctggcgcaagcaataccaggagggaagtcttactgctgtggccgcaggagaacaggtcgttcctgcctctgaacttgctgctgccatgaagcagattaaagaactccagcgcctgctgaacaaaacgccggatgtctcccggctctgaaattaaggcttcggttatttgcacgaaatgttccttttcaaaccctgttgaattttgttaagccggtgcagacacacggaaaacgcacatcaacaccggacggtacgatacaaacaccagtgactggcgggacgaagggaatgacgaatcagtcaggaaatgatgacaaacagttggcagaccagaggagtcagcagaaagatgagcgggagtgtcgccagcatcggggacagggctgatttccgcaataccagcgccggcattgcaacacgtttcatgctgctgctcctcgtgattcctcaattcgctgctgcatccactgctccacttcacttttgtaccagcggctgctgcgccccagtttgatgggtttagggaaatgaccttcactgatcagcttgtaaaaccatttatcggtcataccggtgaaactggtgatgtagttcatgtcgatcaggggatcgtcggcacgcagtaacacgctgtcgtggcttgttgtggtcaacatggtcagaatgtcctttgtgagatttatgaagtttgtgcgaatgcagggaaagatgctgaaccgagctttcagaacggtcctgcagatccgggatagccgggattaccggcgaggcaacgggcttccggatcgcacacaccacgacgatcgcgggcgaaatcactgaacgcccatatcaactctttgaggatgttttcacagtccggtgaacgactgtccagcaccacatcccgggtgatctgcttctgatactgctttgcttcacccggtgacgcgaagcccagtacgttactccaggcatccagtatcaaccggtccaattcagggccatcgaaatactcctgtctgacgcacagcaccacgtggtattccggtttttcaggatgacgggtcaggagccagcagagatcacgtccgggggttgcattcatcagcgcactgacggtttcgataaaatccataccaaaccaggtcgttctgctgttgaaggtattgtcatattcacacggcagacgaagcaggatccgccgtatccgtgagccggactgctcacgcagcgcacgctcaaggacgccgacgactttgttctgataagatggccagaagggggccaggctatagtcgaaataagggatagcattcataagatatgctccgttatgcgcagcccacaatgcgtcctgcccgtgaataagctgacgtgttatggtttgcggatggggttgatggaataagtgaagaaccgaagcagaacgggaagataagggaaagaacactggatgcaggttcagggggaatgatctccgttgacttcggttcacatcattaatcatcccggtaagtttttaccgacggagtgtttccaggagcggaagcagataaaaataccgtttcatgacttcagggctattagcagaaaacgatctaagggcgttggctgacgcccttaccgtgacatacactctggtaccggatgccgttttacagggctcacctgccatccagtagacgccctgccccacgactgcaaccataattacgttgcccagaaccgtcatgctgcttcgtctcatatttcacgagataactggctctgttccgggctttctgcatcgcttccacatcaccacgcttgacccagagcacagcggatccaccagactttttgtctgaagccttcctggtttcagaacatccacccgacaaaggcgtatcatcggaagaagggcgagcatcagatgatgtcggtttacggaaaggcgtccgcctggaaaaatgaaccagtccattaccctgccagggctcgagatgcagagcactgcaccatgccagttggatcagcgtcgccagcgaagaaggaacggtgaaatcccctggcgagcaccaggtatctttgttgagcagtaatatcacgtgataatgtttcctgcctttttccttgccaaactcccgacaccagaaataacgcagagtggttgcacgcacacgcttgttggcacgtcgtttatgtcgctggtaagcctgaatttttgctttcagggattcgaaaaaacgagaaatcaccgctgaatctaaatcggtatccataatggtggcaggcatatactcagggaaacgtaaatccacccggattaacgagacggcacggtgttgcgccagggcactgttgagaatactttcaaaacgggataaccagtaagcattgtgtattggttgattcatgatgagagatctccattgatttggattgacttcacatcattaatcaccgcggtaaaactttacgaactcccaccattgagcaacacaacctactcggataaaaatggaatcccctacaaacgaaaagatgggaaaaaacacaacaccagcaaatgaatttaaaaacggcatggacgacgagaaaagtcagaagggaaacggatcaacagaacgtgcaaacaaaacatcaaaaacgcaatcagaacgatttctggcgctgtgaatcaacaacaacaccaaaacctatagcttaaccacacaactcaatcacagagccgaatagcgcgtttaaaacctgtttacagataaccccaccccaagaacaaaaaccactaacatcagaatcgattttctcatcctgaaaatgttacgtttcactacgcaccataaaagcgattaaccatcgataacgtaaacctcatctgaatcaaaacaccagaaccaatcatcacgctttttctgaaaagagccttgctctgagaaaaaaaaacaccagggccagttaatcatctcatcaacctcatcgctacaaaatcatccataaaaccatttaactaaatcgtcgtaagcactccgtaaatcacgccaggttatctcagccggatttgcgtttttacataaagacacttgtctcaggttaacgactaaaaacacaaaaactaagaaaaggttaaacgtaacttcagaaaaatagaatatcatcctgattacttaaacaagaaaaattgttttgtagcagctttaaactgattttagctaacgtaaagatttactaaactggatgtgtatcagatcaaacaatgtgtacagcaatgcttaatgaaaacacttgtagaattgtttatgaaaatgcgtgtatgtctggtaaaacacttagtagaaaatacgtgtataacacttactgaaatgcttagtaaaaatacttataaaatatgtgtatatagtatcataccgacattagcaacattctcagacactcatgcagactgaatgttgattacccgttttcacatcaggcatggttctttactgatcaaaaaacaaactgatttactcttgaattattttctctacctcaaaaaacatggtctcaggaatctgctatggtttcatagtttctgttgttcttttcataaaagttataagtcattgtcataatcatacgataatcactttatgttagtttttactgtcacacgctactgactttttcagtcattgccagaaaggggctctttttacttccatttcaccactcaacaaatgcaaaacttgtccagtaaagcggaccacctcttgctcacaagcaacgaatcatctccaggaacagccctcaaacattgcagaaacaaaaacaacaaaaccctcattatcactgatgttcggaaaatttcccggaacaaaaaaacgaaatcaaaatgagactcattatcatggatgtagtcaaaaagacgttatggtggctttcagttaaatggtactatttctcataaatccacttaactttttttactgattcatcccagataaccactttatcagtaaaaaatgaattatatagattaacgagtttttctgtttcagttattcccaatgtattatgtatcagttgtagatatgcttttatccagatttctttaccctccctccacttatctataaagctttccagcttacttaatcgttgatttataaaaaacgaatcaatatcatgaaaaagctcaacaagaaaacagcacgagacaatctcaacaaaaaacaaattctccttaaaagtattataaaaccttatcaacacataacgaaaaacacctcctgttaatctttcctgttcataaaacaacaaaccaaaaacaggaggaaatcttttaaccacaccacttttaatccagtaaggatgatgattagtctttactggcaatgaataaaagaacaattcggtttctcttttcccaccacaaacagacaaaactgtcttataaagactttttgaatcattatgtcctgataccccagacgaattagcagagtattttctttttactttttgccttaatggagctggaagaataataaaacgggatggcagataacaatcgctttcagaagaccggcattcgcacacatgaagatttatatttacatccggacaattcaaaaaccacacagaataattatcgcaccgtttgcaatatgaaacccatgaataaattgcataaagttcagaaagcgcatctaactctgcttttgaattaaatgtgataccgtttcttcgaattctcgtttccagcgttctccatgccggggttttcagtatctcacgaacttttttattaagttcagccagagatggtccctgctcctgtttatgtttcgtcctgctgttaatgatttctctttcttttactaatttcctctttctttttgggccttctacctttcttggcaatgcttcatttaatctgtgaacaggattttgctctcttctttttttgagctcacaaaacctctcataatgttttctgcacagtcttttctccactgccatttttactgagaaaacctgattgttacaattttttctgacacatttgtttttacgtccggtcatcctctcatctcctgaaacagcagtatgtcattagttcccgttctgaaaaactgacgccatactccattacactttaacaataatgtccgtaattcagacattccatcatttttcacgcccatattacctgaatgataaaccggattagtgtgatccggttcagtgaaatcaacaggataccggtatgtcattcagccattcttccctctccgcacaagtgaaatcatatctgacgtttcttcctgaagaaattcgtcagaaaattcttgaacatctccacagcgttattcattacgaacccgtgattggcattatgggtaaatccggcaccggcaaaagtagcctgtgtaatgctatttttcagtcccatatctgtgccacgcatcccctgaacggctgcacccgccaggctcatcgtcttaccctgcagatcggtgaacgcagaatgacgctggtcgatctgcccggcattggagagacaccgcagcatgatcaggaataccgggagctttaccgtcagttactgccggaactggatctgattatctggatcctgcgggctgatgaacgtgcgtatgctgccgatattgccatgcatcagtttttactgaatgaaggtgcagatccctcgcgttttctgtttgttctcagccatgccgatcgcgtgtttcctgctgaagaatggaatgccacagaaaaatgcccatcccgtcaccaggaactctcactggcaactgttacagccagggtggcaaccctgttcccgtcatcatttccggtactccccgttgctgcgcctgtcggctggaatcttccggcgtttgtgtcgctgatgatccacgccctgccaccgcaggcaaccagtgcggtttattcacatatccggggggaaaaccgctctgaacaggcccagaaacacgcacaacagacttttggtgacgccatcgggaaaagttttgacgacgccgttgcccggttcacttttccggtctggatgttacagcttctgcgtaaagcccgggaccgcattatccgcctgctggaaacactgtgggatcgtctgttctgacacactcacgccgacaggatgtgtcgctggattaacgagtattcttctttttatgaaatcatcattaaaaatcagataattaaaggaatattttttctgctgcattttattcctgattattcagatacgacacatcctttcaacaccatgaggcataataacatcatgaaataaaagatgttttcttacggagtacacatctatgtctgatgatcgttcccggcatgatcgtctggcggttcgcttatcactcattatcagccgactgatggccggagaatctctgtcactaaagacactgtcagatgaatttggcgttacagaacgtactttacagcgcgattttcatcagcgtctggttcacctggatttagagtacagaaatggcaggtacagcctcagacgacagagcagcccgtgtgcgatccctgaaatgctttcttttatacagaataccgggatcgcacggatacttccgctccggaacggacgactgataacctgtcttaccgacaaccaggagccctctccctgccttatctggctaccggcgccggatatcactgcaacgttccccgagtgtttctcgcaactcatcctggcaataagacagtgtatccacatctctctgatgactgagcgatggtatccgtcactggagccctgccggctcatttattacagcggtagctggtatctgatcgcgttacagaagggaaaactgcaggtctttcctctggcagatatcaaatcagtcagcctgacatcagaacggtttgaacggagaggccacatccacagtctggtcgctgaagagcgttttatctccgccctgccacatttctctttcatccataaacttatcaacacctttaacctgtgatcgccggcctgccaaagccgtcccgacaggtatggagacaatatgttgaacagaaaactaaatatacggctacgtcattccctgaacagtcactgcataccttccatcattatcaataacaccgtacgttcatttcagaggtcagtcatgaataccagagctctttttcccctgctgttcactgtggcatcattctccgcctccgccggcaactgggctgtcaaaaacggctggtgtcagaccatgacggaagatggtcaggcgctggtaatgctgaaaaatggcacgattggtattaccggcctgatgcagggatgcccgaatggcgtacagacgctcctgggcagccgtatcagtattaacggtaacctgatccccacatcacaaatgtgtaatcagcagacgggattcagggctgttgaggtggaaatcggacaggcgccggaaatggtcaaaaaagccgttcactccatagcagagcgtgatgtgtccgttttacaggcatttggtgtacgaatggaattcacccgcggtgatatgctgaaggtctgtccgaaatttgtcacatcacttgccggtttttccccgaaacagacgaccactattaataaagattccgtcctgcaggcagcccggcaggcatacgcccgggaatatgacgaggaaacaacagaaaccgctgattttggctcttacgaagtaaaaggcaataaggttgagtttgaagtattcaatcctgaagaccgtgcgtacgacaaagtgaccgtcacggttggtgctgacggtaatgccaccggcgccagcgttgaatttatcggaaaatagccggtatgtcggactgccaccctgttttattgcccgaaggccctttctcacgcgaacaggcggttgccgtcacaacagcttaccgcaatgtgcttattgaagatgaccagggaacgcatttccggctggttatccgcaatgccgaagggcagctacgctggcggtgctggaattttgaacctgatgccggaaaacagctaaattcgtatctcgccagtgagggaattctcaggcaataaacgtcttcatttcatccatcaggccgcgtcttctccgggagacgcggccttttcgtttataccgctaattcattcataaggagcaaagtatgcaattagccagtcgttttggtcatgtaaatcagatccgtcgggagcgcccactgacacgcgaagaactgatgtaccacgtcccgagtatttttggagaagaccggcacacctcccgcagtgaacggtatgcgtacattcccaccatcaccgtcctggaaaatctgcagcgggaaggctttcagccgttcttcgcctgccagacccgtgtgcgcgaccagagccgccgggaatataccaaacatatgctgcgtctgcggcgggccggacagataaccggtcagcatgtgcctgaaattattctgctcaactcccatgacggttcatccagctaccagatgttacccggatattttcgtgccatctgcaccaatggcttggtctgcggtcagtcgctgggagaagtccgggtgccccaccggggaaacgtggtggacagggtgattgaaggtgcttacgaagtggtgggcgtgtttgaccggattgaggaaaagcgtgatgccatgcagtcgctggtcctgccgccaccggcacgccaggcgctggcacaggcggcgctgacttaccgttatggtgatgaacatcagcccgtcaccactaccgacattctgacgccacgacgccgggaggattacggtaaggacctgtggagtgcttatcagaccatccaggaaaatatgctgaaaggcgggatttccggtcgcagtgccagaggaaaacgtatccatacccgggccattcacagcatcgataccgacattaagctcaaccgggcgttgtgggtgatggcagaaacgctgctggagagcatgcgctgatgctgtttccctgaaagtgcagccctgactcacgtctgtaccagtccccatgcattcttccattcatttactttttataaggaatcatctcatgacaaccttttcgcatagcgtccaccacaccttctgtttccgtaactactgcatcagggaataaccagtctcaactggttgccactcccgtccctgatgaacagcgcatcagcttctggccgcagcactttggcctcattccacagtgggtgaccctggagccccgtgtcttcggctggatggaccgtctgtgtgaagactactgcgggggtatctggaatctgtacaccctgaacaacggtggcgcatttatagcacctgaaccggatgaagatgatggagaaacctggatactgttcaatgccatgaacggtaaccgcgctgaaatgagcccggaagccgccggcattgcagcctgtctgatgacgtacagccatcatgcctgtcgtacggagtgttatgccatgacggtccattattatcggttgcgggattacgccctgcagcatccggaatgcagcgccattatgcgcatcattgactgaaaggggccggaacaatgcaacagatttcctttctgcccggagaaatgacgcccggtgagcgcagcctcattcagcgggccctgaaaaccctggaccgccatcttcatgaacccggcgtggccttcacctccacgcatgcggcacgggaatggctgattctgaacatggcgggactggagcgtgaagaattccgggtgctgtatctgaacaaccagaatcagctgattgccggtgaaaccctcttcaccggcaccatcaaccgcacggaagtccatccccgggaagtgattaaacgcgccctgtatcacaatgccgctgccgtggtgctggcacacaatcacccgtccggtgaagtcacacccagtaaggcagaccggcttatcaccgaacgtctggtacaggcactggccctggtggatatccgggtgccggaccatctgatagtcggtggcaaccaggttttctcctttgcggaacacggtctgctttaacccgtcacaactacatcacacttgttttcacttttatcttctgtcttcagaggtatcccatcatgaaaattatcacccgtggtgaagccatgcgtattcaccaacagcatcctgcatcccgtctttttccgttctgtaccggtaagtaccgctggcacggcagcgctgaagcgtataccggtcgtgaagtgcaggatattcccggcgttcttgccgtgtttgctgaacgccgtaaggacagttttggcccgtatgtccggctgatgagcgtcaccctgaactaagtcaggaagggcattctgatgagccgaattatcgccaccatcgaactattcttaactgatttcagtgaggactttatcgtgtcagacacactgcccgggacaacgcatcccgacaacaacaaccgcccctggtgggggctaccctgcaccgtgatgccctgtttcggggcacgtctggtgcaggagggtaaccgcttgcattaccttgcagaccgcgccggtatcagaggccggttcagcgacgcggattcgtaccacctggaccaggcctttccgctgctgatgaaacaactggagctcatgctcaccagtggtgaactcagccctcgctatcagcataccgtcacgctgtatgcgaaaggactgacctgcgaagccgacaccttcggctcctgtggttacgtttatctggctgtttatccgacgcccgaaacaaaaacgtaaaccaccaagataaccctctgctccagccaggtgctttcatcacgccactttcccatttttcatctctgcatatcaggaaaatcttcagtatgaaaacattacccgacacacacatacgggaggcatcgcactgcccgtctcccgtcaccatctggcagacactgctcacccgactgctggaccagcactacggcctcgcgctgaatgacacaccgttcgctgatgaacgtgtgattgagcagcatattgaagcgggcatttcactgtgtgatgcggtgaactttctcgttgagaaatacgcgctggtacgtaccgaccagccgggattcagcgcaggagcctcgtcgcagttaatcaacagcattgatattctccgggctcgccgggcaacaggcctgatgaccagccacaactacagaacggtgaacaatatcaccctgggtaagcatccggaggcgaaacgatgaaactgaccctgacgctggaagccgacagcgttaacgtgcaggcgctgaacatggggcgaattgtcgttgacgtcgatggtgttaatctcattgaactgattaacaaggtcgctgaaaacggttattcactccgcgtggtggatgaacgtgacgctaccgaaacaccggcgacttctgccagccctcatcagttgccggaagacaatacagtgatacagagcgtgatgccattaaccactgaaacagcgctggatatcctcattgcgtggctgcaggacaatatcgactgcgaatcgggaattatctttgacaacgatgaggataaaacggattcggcagcactgttgccctgtatcgaacaggcccgggaggatgtccgtactcttcgtcatctgcagcttctgcaccagaaccggtaaatatcactcaccatacttcattccactgacgtcagcctgaacagggctggcgttttcgtttataaaccaaaagggaaaccgataatgtcagacatcacaatctcccgtccggaagtggtcaccgggcatacggacgttatctgctcaaccagtatccgccacattctggctgtacgaaagagtacactgctgcaaatcgacacacttatccggcaactggctgaaatatcagcaatgacagaaagtattggcggtaaagccaccccgggctgggccatgaaacaggattttcgctgcggctgctggctgatggagaaaccggaaaccgcaatgaaagccatcacacgcaatctcgatcgcgaaatctggcgtgacctgatgcaacgttcagggatgctttccttaatggatgcacaggcccgtgatacatggtaccggtcactggagtacgataattttccggaaatcagtgaagcgaacattctgatcacatttgaacaactacaccagaataaggatgaggtgtttgagcgaggggtgatcaacgtcttcaggggactgagctggaattacaaaaccaattgcccctgcaaatttggcagtaaaattatcgtcaacaacctggtgaggtgggaccggtgggggtttcatcttatcaccgggcaacagactgaccgactcgtcgacctggaaagaatgctacatctgttcagcggcaaaccgatccccgacaaccgggaaaacatcactattcgtctggatgatcacatccggtctgttcagggtaaagaatgctatgaagatgagatgttcagcatcagatactttaagaaaggctccgcgcacatcaggttcaggaaaccagaactggttgacaggctgaatgatattattgcgaaacactatccgggagtgttaccttcataataaagctctaagaattgattcgattgtgtattttagcttcattcccttacacaaagttatttgggggttcttatgggggttactcatttatccaacacagattaatcatttaaaatcaaaacattaacacccatattcgactcctgtgatcgccaaaatgcctcttcagtgatccccatcctgcttatttctgagcaacctgaccctgctgatgtatctggtagtatgacagagtgattcgtttttcttgccgagtgtacgaaaacgtcttccttgccaccgactatcaaccgtcactcaaaaaaacctctctttttttcaagctatcaagaataagttgcattttatctgcaccggacaccagccatccatatatggcttttacctgctacaaagatgaagaagtgcataaatgtgatgttaaaacaatcaaagaaaaattacatgcgcaataatttcactataacattataatccatggtgaaaataacactgcacaaggattgtcatcatcaaactcatcggaactattttttctgtcgtcattggtgtaatactgattgtaagtatcctttcaggagattatttttgccgtgtgggacatggaacttgtaaagcagccaaaagcgctaggcatttaattgaaagtaaagagaaaaacagaagtagtcgcgtcaaagtctttagcacgcatattaatttgagtcatccagcggcatcctggctagcaactcaaacttgcgctaacaatatattcaatctacttcaaaacaataatgccatttatttattcgaaaacgataataaaattgaactgcgaatggggtatgattcttttttctctattgaaacgattgataaaattaacaaagaaaacatcaaagaaataaaactaaaaaatgatacaacatatgtttcccttcctaatccaaccattttaataaccacgacatcaacacctgaacgacagttttctatttctgttctggatgatgataacaaagaaaatctacctaccgataccgcaccttgttttacaattggtattcctgatgaatatactaaagccatagagttattgaacattaaataattaaatttcatattgagtttttttaaataccatatgaataattgttatatgtcattatttcctccattcactaaaactgattgattactctactccctcaccgtcatcggtagtggtatccttaacgtatattgatg

SEQ ID NO: 183 - DNA, 1393 bp, Escherichia coli
gctgcgctcctgttgcttgtgaaaagaaatgatgccttcaaggtttggtatatcgactaatcattaaaaacgctggcagcattaataccttgttagtatccattttgaataagaaaaatatatattttatatttatagtttgattgtttgtatatttatgaattattacttcagtataaaaaccactctctaaataattcgcagacacagcacatgcaacttgaagtatgacaagcatgcctgcttcattattacactttaataataaaacccaccgattaatgtacaaaaaaatccctgcgtgatattgtctgtaaaaaaggagcagatatgcgcactcaccctcacttaataaaacaaactattgatccacgactcattaatgaaataaacaaaagaacacaaagcaacagtgagaagttatcaaacagtgataaattaacatatattaatgacaactactgtgagataacgcgaaactacacgtcattttatggtatgaacatgctgagcatcgttcttttcttacctatcgttattttatgttttgcctctgttttattctttatatatgacataacatttaacttcgaacgatacttagatacgtggagatacagagcagactctgagttaatgctacatattgcttactgcgcaatttttttcatgtcttttgtttttgctgctattctaaattattttatctttgctccgcgacattacccaatccgttttaatagaaaaacaggaaaggtctatatttgtgattatattcttaatgatatgagtcataaatcaacctatactttctggtggcactatccattctataaacataccaagcctgaatataaagagtacgactgggaacaaattcaaggtatagctttttttgcacaaaatcgccattcctcatactccactattcgctgtattgtttatgaatcattagacagtacaaatattattgacacctttaacctgataacgacagagagtgctatagatgcattgcatatgacaaatcacaaattatggttatggattaatagctttatgaattttgacgatgagtttttagagaaatctatcaatactgctccaggtatttggggccgtgaagtgaattggcctgaagatatgaataagaaatcaatgttgtcttcaatggacgaatatatactctgaataattcgagttacagaatatactcgtcatacttcaagttgcatgtgctgcgtctgcgttcgctccccccagtcacttacttatgtaagctcctggggattcactcgcttgtcgccttcctgcaactcgaattatttagagtatataagctcgcccggatgtaaatatcccatccaggcgagaaaatcacttactgaaaaaa

SEQ ID NO: 184 - DNA, 100 bp, Escherichia coli
gcatcatcacctgaaagacggtcagattgttgacagagtgcgccttattcatgtcgaatacagcgtaaacaccttaccctaccaaccgcaccatcactgt

SEQ ID NO: 185 - DNA, 54 bp, Escherichia coli
gtaaggatgaggctggctatactaccacgctgttattttcccctcccgactttc

SEQ ID NO: 186 - DNA, 2552 bp, Escherichia coli
tgtgaagttcatgcacattctcttctctgacgcgtgttttcgccgggcagggggagggcgtaatccttacctctgtatcggtccatgtataaacattgcgatcgtcataagcaaagcgatcgtttttagttagcgggccgttgttagttggaataatttgcacgctcttgcgtgaccgtaattggtggataaagtaagcatgctgtttgccgcgattaaatgagtgatcaatgaccaggtctggcgaatccagcgggattatttcaagctggtcttcaccaaaagtcgataattttgttacatacagccgatctttatactgcgcaatattgtcagtaatcagatgaaattgttcaggttcaataccttgtaggtctatccactggctccactgacggtcgggcgtgagctgtttacgccagcgaacgcgactttcccctacttcaaaagagacgtcatcatctacgggtatcgctttgccagataattgaccaaagggataacgatgcagacccttattgtcgcgaaaaaccagcagtgaatgaggtatccagcgaattatctcaaatgagtctgcattcgccgtaaggtgagcgccatttaaataaatattctgcccactgcggataagcagatcattggaatacaaatttctgtttacactcataagacgtggattaataccccaccatcttttttctaatacagtaacattactgctgctcccctgacgtcgaccggacaagtagagatttttactatccaccagcgtggtagagttaccttcgatagcttttagtgtcgccagatcaacacgtgacgcgccgctattactttcggtgcgctgtccgtcaaaatagaggctatatttatcgaccgcgaagcggcccatagcttgaaagctggcaatatcgacagtgggtgttcccggtggattgctaacgattttgccacgccagagaataacgcggccgtctgtcatccagtggtatgactcattttttatgcttatttcatcggaaggtatataacccgtcttcccagagatatttttcacaaggcgcaaatcggccctgttcatctccggaaattgggcaatgattttcttatccccccaataacctttaccgtaagacatgacaccgtgatcattgtaatagtcgaaccctatggcctgtacaggaggtgtcagaaatgagttccccaacaggatgagtgcaactgtgattatttgaccattcattttgttgcctcattgcgtggggcaggaataaattcgccgtcatcggtaatttttccgtccagatatcccgttttgtaatttacgccatagccatatcccgaatgttgttccttccagattaagcgaacttgtttcggatcagcggtgcggtatcgccagagctgcgcgccatcaaagctgtaaacgtagcggttatcgcgggcataccatctgcgcaaaaagggatggtcattaagatgggcttcgcgttcatccggagagcggttatccagtaagatcagcggtccgtcagattcaaacacgtgtaaactggaatggtttacccacccttcggcatgcgtaagtaaatagccgtggcgtttcccggcgttgaaacgtttgttgataataagattggggtcatcgagttttacgatctccaacttgcggtcaccagactctgtttcgatgatggtataaagcgaatcctgatactgggcgacagcatcactgatggggtggaactgttcaggatcgagtccggataattcttcctgtttacaagcaggccctttacgccagaacactttcttttcctgcagagaaaaatccagacagtgctttgttaaatcttcatcccacgccagattttccttgtcgaggactttacgctgcagcccgtttttatcacgccaggtgaagagtgagccgggcatccagcgcacgacggaaaaggtgtccgggtcggcatccagttgttctccgttgatcatgattttcgtctgtgtgcgggctagcgtatcccaggggccaaatggggcaggaaggcagggattaaatgctgtagagaatttaccgcgctgatcccatgacttttgagccagtaccgtaaaggtgtcgggatcatcaaggcgctgaccatttgcgtaaagatagtgcttgtcacggagaatcaaacctagccagtctggtttccattgcgggttaaattctacctgacgcaacgttcggcggtttagttgctggttgctatcggtgcgtttgccttcgtaatagaggctgtacttatctgcggcaaaatcaccccatgcctgaaatgacgagatatcgactggcggtgtgcctggagggttttgcacaatctcgccagcgtagagaatagcgcgaccatcgctatagtaagagtaatggggaagagttgcgtttgcgccgctgtagacaacgtctgtcatgagattggtagccgggggcaccgtttcccaatcctccagtttggttgggtcaattagcaaattcggtaacagacgcagacgcttgtagttaatctgcg

SEQ ID NO: 187 - DNA, 1038 bp, Escherichia coli
tttacgattccgttgccagatgcggtgcgccacaccgcatccggcatcagtaacttacttagtgcacttcttcacatcaatattccagtcagcaccagacgcaacctgatgtttctgcgcgaaattatccatattcagcgccacggaaacattcaataagctgttcagatacaccatcggctggccttccggcacatcgccgaagcttgcgacatacggcattttccctgcgtatttttgctgggaaccttcggaaatggtcacacacaacgtgtcgttgagtttgattcctgcctgattcagcaactcgtcgctgatattgctccagacgttgccgtactgaatatcgagaatcgggatattgcccttcacttcaccttttgttgctttggctttctgataagaaagttcgacaacttttgcaggaagctctggccccacctgctcgaacgtgatcgccccggaagccagacgtgcaccggtgtaggcatacacatcacgaccgtggaaggtatatgacttttcggaacctttcagacggttggttttttcatcgatttgccggacgctctcaatacccagcgattccgccaccaacgtgagcgtaccgttatctggtgaaacgaagtactgaccgtttttggttttcagcactaccgatttacggtctgtaccaacaccaggatcgaccacgctaacaaacaccgaaccttgcggccagtaactggcagtctgatacaggcggtaagcgccttcccagatgttatatggtggaatttcgtgtgttaaatcaaatattttaagattatggtcaacgccgaaagcgacccctttcatcgtcgagacggcgccatctttcaggctaaaatccgtttgtaaaatcaaagcgttatccgcataagcggatgatgaccccagacaggttaataaaaataatgttgcgagcgtttttttcatttttgtttcccttcatttatctgatgattttccagctgtgtagccagccccagtttgtctggcctcctcgagtgtacaatg

SEQ ID NO: 188 - DNA, 1604 bp, Escherichia coli
tataaatgccgggtaaagattgttctttatccggcttattgctgaaaattgtctttttcaaagtcatgcgggttgaacactcgctctatcttattttcctgggttagttgatactcattgttatcagcaataaaaaaatgagtattacggtaaggatattcattaataaccattaaatagttttttacgatgcaattatcattgctcttaatcgtcgggaaacagtagagatcttcatacggcccttcgatatattttttatagtcagtgaagccattaccgatatcaataacataccaggtatgccaactaccttctggtaggggattttgacttttaatttcatcctgatgcttcagataccaatttattttatcgctatcagtccatggcagatgatcaacgaccagaaagactgaattgccagcatcagagtatgtatacaaaatctgtacaggacgcaatgtccataaattatagatgcagcatagaagaaataaatataatataattttctggagttttcttttcatagataattttcgattctttcgatagtgttaaaattggtgaaaaaaggtttgaaagcaaagtctttatgccgttgtaaaaagaaccatatgcgaaaaaatctatacttgttgtaaatcttgttttttatatcagtcacatccaaaccaaagtggtcttgtgctatgaaatgaatggtagcgctccagcccataggatatttttgaaaatttaaaagagatattttttgagctgagatatcatgaatgctgattcccaggccattaaaattatctttaaaatcattgaatttatttagtcttgatgaaagtaattcggtcttaatcttttgtaggagaagaggccggtatcctatcgtaggtgttgaagaaatatcattttcgatacattctttgattacacgtattgggctattataatcatatttgtttattcgttcatgaaaagataagttcaattcctggctatggaaactgttgccatttccatatctaaaatgatcaatcagatcctggatgagtgttttgtattgtccaaaaaaggaaaacatttttgccagatctttcatttctgcaaataaaatatcaatacattcactttgtgatatttttgttccagaagttggaacactaaaagcaccataagtagaattcggcccaggaaaatggtatttaatgaggcggtaaggatcaacttttgcagagatgtcgcttaagccgagtgagagaaaatcttgttcttccatatccccatactgcatatcatcagcagaaaaatcatcgaataaagtaatagtttcgaaaagtgtacagggcatattaattgatgagcctaatatgttgttcatttatattctcctttcttataattaagggcaatgttaatttgataagaaataatagggtaaaaaaattttaaaaaagaaatgcacttcacatttttcattacattctgaagagaacttggttaatgattggtcttgctcatcgctaataacataatgctgaatttaccaaaaatgaaatttattaaagcaaatgaaaatatacaacgacgtctggaaattctgcctt

SEQ ID NO: 189 - DNA, 16057 bp, Escherichia coli
atgatgagtattaacgagtcattgtaaattgcagtacgataatggcttccagtactggaagccattttgcatgagtgccagattgaagcagatcttcaggagtagaaataaccgaatcgtttttttcgcaaaacacagttttgagtgattccgttcagtaatcaacgctacgttatttattctcacgttgcacgagattgtatcccttttcactaacgtggtagtgaggcatagacttatgcccgctatcctcaataataaccaaaccttcgttagctaatttgttaacaatattaacaacattaccgaatcctggtatttgccttatggatagtgtgcgatcgagattcatccagttccagtttatatctttctcagtcataacgttcagcacgttaagttcatttttagtgatcacgatattctgtaccaaaattgatgagtatcttattgaaagatcacaatgtaaatcatgctcctgtaatggctggatcagaagaggttgtcttgttgttctttgataagattcaatccatattgagaaactctgtagcgtggtttagagttgccctcaccatttacgatatcaaccaacccatgattaaccagctttgttacgatattcgctacgttgccaaatcctggaatatttcgtatagctaaagtacgatccagcaccatccagctccagtcaatatctttctcagccataactttcagcacgttaaattcaactatcgtaatcgtcatttttttgcatccggatgaaataagtcagtatctttaattttaaagtcttctagagttgcagtatgtgcattattccataattcatatccatctaaaccattcggttcacctgtttcccatcctaaattacaataacgctgatactcgcggcattcatgagtatagtagttcagatcgtatttttcaggaagcaattctttatttgctattttttttagccttgaaatcattacatcattagctggatcatgatcaaatctggagatatgcttttcaacaatagcgataccttccctattgattgttacgccatctatcgtcaggttttctattggaccaccggcaaggtcgggattaaatggtcttcctgatactgctcctctggctccgaaatgctcaaatgattccaaatcagggaatctcattcttcccagaacaactccagcaactattgaagcaccagcgatgaagtaaccctttgttatccatgaacttgatctgtaaccagcaggtgcatctcctcccaacttgtttgctgtgttccctgaatccttcgatattcccattgtatatgccgccagcagcaagcagtctgccaaccgctttactattgagtgttttgaggccattattatctttagttttttgccgtggtataaacagacggttgtagttatcgggaaatgccaaatgactaaattcagtattagcaatcagatgcctggagagtatatattcataactgacagtgatggtttctgtatccagattgttctcagtaaacaggtgattgattgctgataagagcgcgccgcggagttgaatgttgtaatatttctcctatcgaccaaatctattgatccgatagaagtcaaactccatgaacaactgctcgttattgttaatagcgttaataagtaacggggagcttttgtcaatcaacttacagaaactaaggccatgtaattgtgaccctttgcctgtattcgtaatactattagatagcgagaacgcgaagatttcatcttcatggccaatctgccagcgattacctattgatgcgctcgttccgcaacgagaggaaatacatccttgttgttctccggttatggtcaggtaaatttcatcactcatctttgatgaactctctttattgcttgatgttttaaaaataaacaatattgctatttgtttataattatttactcctcaagttaatggatttaaatatgggaaataaaatgtttcactttagaccagttttcatgaggaaaatctgtaatcattaataataaacatgaatattttgcagtgattaatatttgttatgaatataatctataacaatgaagagttatcagttgttcggtgtatagccagagacgagttcagtttgtgatttttacagggcagttacagccgcaaaattttatggctgatttcaccttcccctcaagcttatctttcttaaaaagagaaataattcttaaattcaaatagttatatacaatctactctctttcttgtgactagcttcacatttcatactgatgcattggaatgaaataaaatttcatgagattttgtgttttagaaaaattatttcatgaggtgtgaaatggacgcaaagctgtacatcactgagatcatcaatgaattaaccttcgttaaggactctatccgtgaggatgactgcaccaaattgatcgacgctattcagcaaagccagcgcgttttctgctatggcctggggcgtgccggcttttccatgaaagccttcaccatgcgcctgatgcatatgggcaaagaggtttacttcctgacggaaaccattacgccgaactttgggcctggcgatctgtttatcgtttcttccgcttccggtgagacagcacaactggtggcactggcgaaaaaagcacgtcagtttggcggcgctgtggcggtgttaaccacgaatcgacacgccactatcaccgagtttgtcgacgtcatcgtgcaaatcaatgccccttccaaaaatcaaaaagattctgttttccgctcggcacagccgatggcgtcgttgtatgagcaagctttgctggtgattgccgatgcattagtgatgaagatggctgctgaaagcggtgcgccggaaagtgaactgtttaagcgccacgccaatctggaatagtcgtcgccgttatttgctcgataccctacaggagaataaaaatgagcaaaaaaataacatccttgtttaacttcaagaagttgcagaaattttcttctgctctgatgttaccaatcgccattcttccggcggcgggtttgattttagccatcgggatttcatttaacattgagctgctggcgaattgcggcggcctgattttcgccaaccttcctttgctgttttgtgtcggtattgtgattggcctgacaggtgatggttcttcatcactttcagcgattatcagttacatgatcatgaatgccacgatgggaacgcaacttggcattaccgcggagtccgttgcagccagtaacggtgactatgcgatgatcctcggggtaccgacgttacaaacgggagtgtttggcggtttgattgtcgccatctttgtttatctgctctatacccgcttccacaatattgaattgcctcagtttcttggtttcttcggtggaaaacgctttgtaccgattattacggcggtggcggcaattattgtcggctatttattgccgtggctgtggataccggtacaaaaaggtctggcgtcgctttcaacgctggtgaccagtgggcataacgcgaacttcgcggcctttatttacgccgttggcgaacgttcgctgattccttttggcctgcatcatatctggaacgtgccgttttattacaactttggcgactacatgaccaaatccgggcaactggtgacgggcgatattccggtgttctttgcccaattgcgcgacggtgttccgttgacggcggggttgtttatgacaggtcgtttcccgatcatgatgtttgcgttacctgccgccgcgttggcgatgtatcaggaagcaaaaccggaacgtaaggcgctgattaaaggccttttactctccggtgcgcttgaccacatttgttaccgggattacggagcccgctggaatatgcatttttgtttgcagctccggttctctacatcattcacatcttcttatatgccacttcatttgtgctgatgaacatcctgaatgtgcacattggtcatccttttgctggcggtcttattgatttcgtactgaatggcgttatgccaaaccgcacgccgtggtatctggtgttcctggcaggcgcgggctatgcagcgatttactacaccgtatttcgggtactgatccgcaagttgaatctgaaaacaccggggcgtgaggatgaagagattgccgttgcaaccacattaacgcgcgaagaacgtccataccaaatcatcgaagcagtaggtggtttcgacaatatcgaagatgtggatgcctgcgcaacacgcctgcggctggcgctggtagacgataagaaagtgaatgaaaaacggctgaaggagttgggggctgcgggtttagtgaaactgggtgatggcggtgtacaggtgatatttggcggcaaatcgcaaatcctgcgcgacgaaatcaaaaccgtaatgagcagaccgcgcccgacagaaatgacagtggcctgtgctaactaattcgagattagcgggctggtttcagcccgccagacagagagagctgaagtatgaattcacaattactggctaacgccatccggatgttaagtgttgatgcgatccagaaagcgaactccggtcatccgggcgcgccgatggggatggcggatattgccgaagtggtctggcgtcgtcacctgcgtcataacccaaaaaatccgcagtggtttaaccgcgaccgctatgttcagtcgaacgggcacggttccatgttgatttacgctttgctgcatcttacaggctacgacctgtcgatggatgatattcgcgactttcgtcagctccactcccgcacgccaggtcatccagaatatggttatacgccgggtgttgaaaccaccaccggcccgttggggcagggcgtagctaatgcggtggggatggcgattgcggagaaggcgctggcggcagaatttaacaaaccgggctttaatattgttgatcatcacacatggctatttttgggtgatggctgcctgatggaagggatctcccacgaggcctgtggtcttgcaggaacgctgaagctcggcaatctgattgctatctgggacgataacggtatttcgatcgatggtcacgtagaaggctggtttgctgaagatacggctgcccgttttcgtgcctacggctggcatgtcattgaaggcgttgatggtcacgatccagaagaggtagatgctgcggtgcgtgaagcgaaaagcgtcacggataagcccagtctgctgtgctgcaaaacgattatcggttttggttcgccaaataaagccaacagccacgattgccacggctcggcgctgggtgcagatgaagtggcgctggtgcgtgaacgtctgcaatggccgtatgcccctttcgaaattcctggtgaaatttatgccgcatgggatgcgaccgagaaaggcgcgcaggttcaacaggaatgggatgcactgtttgccgactacgcgaagcagtggccggaactggcggcggagtttactcgtcgcatgaagggtgatttgcctgctggctgggtcgagaatatgcagaaatatgtgcacgatctgcaatcccatccggcggcgctggcaacccgtcaggttagccagaaatgcctcaatcacttcgcagatatgctgccggaactgatgggcggctcggcggacttgtcgccctctaacctgactcgccatcagaaatcggttgatttcaccggagaaaatccggcggggaattacatctcctatggcgtgcgtgaatttggtatgtcggccatcatgaacggtcttgcgctgcatggtgggtttatcccttacggcggtactttcctgatgtttatggaatatgcgcgtaatgcactgcgtatggcggcgctgatgaagatccgctcggtgtttgtttatacccacgataccatcggcctgggcgaagacggcccgacacatcagcccgttgagcaactggcgtcgctgcgtctgacgccgaatatggaaacctggcgcggttgcgatcaggtggaagtggcggtggcctggcaacaggcgattgagcgcaaagatggcccaacgtcgttggtattaacgcgccaacctctggcgcaacagccgcgcaccgctgcacagttggcagagattgcgcgtggtggttatgtactgagtgattgtgacggtcagcctgagatgatcctcatttctgcgggttcagagattgagttagtggtcagcgccgcaaaagcgttaacggaagaagggcgtaaagttcgcgtggtttccctgccgtgtaccgagcgtttcgataatcaggatgcggcgtacaaagagtcggtattgccaaaagctgtacgcaaacgtctggcggtagaagccagcatcgccggattctgggaacgctacgtgggcctgaacggtaaagtgatcggcatgacgagctttggtgagtctgctccggcgaatgtgttgttcaaacactttggttttacgccggaaaatgtcctggcgcaggcgcgtgagctactgaacagctaaacctgcacaaggggtgaaaggatgaccttttaccccttgaaacgggagccaagaaactcttcacgggtgcggtatttctcgtaatgcgccttgtttttatacataaacaacagcaccagcatatcaataacgcccattgccggaacgcgagtggagtcgaaggcttcaaagaagattttatcgctgaccgcggtattgagttgatgggtggagagttttgataacggagatttaatatagttagtgatacaaacggatttggcaccgcgctctttcaccactttaaagatatcgaccattaagttggtgctgccagagttagaaataccaatcgccaggtcgcgtttccccatagaatatgcccgcattaatttgcatttccgggctgacgtgaacaacggtttttaatccgagttggctgaatttataagcaccataaacggccagagggtttgaatttccagcagcaaaaaagaaaatagtatcgcaattagcaagtagtttgagaatggactcaagcacttcggcattaaaaaattgcgttgattgtattaaatcttcggcctgtttttttaataagaaggttgccaaagatgttatatcgctgaagtcggtattttcaggatagctattgtcaggattaatgacttcttttgctaatgcaatttttaaatggtaataaccctgataacctaatttcttacaggtgcgtacgatagtcgcttcactggcatggcttttttctgatagttcagtgacactatagttcacgacttcatgtgcgtggctaagaatatagtcagcgacctttttttccgcctgatgcagtgtagggtaattgctttgaatcagactttttacggttatgttattcataattagtaaatttcattctgacagaaagtgctgattataacatagttttcaggcgtggataggtgtgaaaaaaatgaaggtgtgcagtgaacgtaatgattaacagaccggttaattttcatgaattacgtcaactgcacaaaaataatttaaacgggtgctctaattaaagcaagacttatatttttatcattgtattgtcaattaaatacaaattgtgtcattaattgtgggtttcttaaatattctatgcaccactgacaggctttgcccataccatcggaacgagcggcaagaaataacttggtggcgtgtttatgttcgcgcattggctttttaagcaatttaccgctgttcaataacggcaatgccagatgatgtggaatataaccaataccgacgttttgttctattaaggcgattgccgtagcgaagtcaggaacaaaaatgggtttttgtccttccaacaaccaggcttgcatcggggggaagttaacggaggtatcgcggatacaaaccgctggatagtgacgcaattcactgttttctaatggatgccgcttcgctgccagtgggtggagtgggctgacgacaaaatcccattccatttgtccgaccggttcgctaatgatgccttcactgcttggtactgcatgaggagcaccgtagaccagatcagcacgcttactgtacagcgcatcccagcagccgttgtatacctcaagatctaccgtcagtgttgttgatgtgaattgccgttcaaaatctcgaataaatgccaccagcaaatcaccaggaataatattgtttaccgcaattgtcagttcacgctcaataccatcgtgaatcagcactgtgttgcgctttaatgcttccaggtcgccaagaatagttttgctatgttcgatgaagtaacttcccgctggcgataattcaatatagcgtcccttacgaatgaacagttcaacgcccaggctctcttccgctttcttgatagtgtaactgatggcggaagggactttatttaactgctcggctgcggtggtaatgctctggtgtctggcgaccagatgaataacacgaagcgtttcgtctgagatgaacataaggctccctggtcagtggtaaagtggctgaatctctccagattcagccgtaatcattgcctgagtatacccaggaattagcggtgttgacttgcccgactgagaatcgcatacgcgatacatgccaccagaatcgagtctaccgaagggatcgtcgtcagggtgaataagccttttacggtcataaagccaaccgctgcgcctatgatccatgctgcgaatgtcagcactttaatctgtgactcctgggctaacactgactcttgatagccattacggcgataaaggaaaaagtcagcgatataaattccggcaacgggtggcgtggcgatacccaggaacagcagaaacggaataaaccacgccataatatccatactgcctacgatggcggaaaggatacccagcgccacggtaatctgccatttgggaaagcgggtaagcagtgtggaaaccaccagcgtgccctggaacatattgcccgcgttaccggtgacgcaggcgaaaatcaacaacagcgccgcaggcagaaccgcaccgaataccgccatcgcacccagtaaagatccctgaccactaatggcgctcggcgttgcacccgcccagtagagcagagggtaggcaaccagaaacgtcacgcctgcggcaatcagcgcatgtttgcggttatgcacaaaactaccgaaatcaggcagtgtggcaaccagcacaataatggtgccaacaacggtggaaacggcgacacctgtattcatctccacaatcgccgctggtactgccacttcggtatgggttgccacatagaggatgtaacacagcaccagcgcgataaccggcacggcaacttgggcaatttttcccagaacggtaaagccaaatgccgtagaggcgacaaaaatgacacagccagccgccactaacagtgccagtggaacttccagtccatgttgagccagtaagtcatgtaccgaatgaccaaacatattggcggtaacggcaatccagccgaacagacttatcgccatcaaaatgttaatggcgatggcccctttttcgccaaacgaatatttcacaatgccatacgttggcaggcgggctttttctcccacgctaatggtgatggctgaaagtaaggtcagaatgacgccgcctaacaatacgacgctaattaaactgctgctggaaagttgattgccgaggcttgaggatgacaacagtacaggtgtgacggcaatacccagcaaaatcatggcaatacgcaatcctgatgccgtattcagattctcttcttttttacgcatagtatgttccctttataaatgcgcgttacacagtatgaaaatgcccggtgtatttgcgccagctacccagttctgtaatttcccgttggccttcggtcagccagttttctgccagtacgcccagcacttcgctaccatcggcaagtttgattttgccaattgccagcccagcgggttcgctcattaacagagcggcaaaactggccagcggtaattgccaaatttctacgtcgacgtgtgttcctccttcattcacgcgaatcattcccggatggcgatcattaatactccacaaccggtaatgggcgtcagttcggtcttcacggacaaaaataccgcccgctttttgcatatttgggttgagttccaggccgcgcatcagcgttccgttaacggctaaaagcgttgtagtcattgtgttctccagagaattaaagggttatccatgtaccgctctgatgcgccagggctgcttttatggtttgcggtgaagtaatcaggccgctggcctgtttgccttgttgctggctggcattgatgaaatcaacaatggcttccactttgggttgcatactgccgacaccaaactgaccttcccgcaacagcgtttgcgcttcggcaacgctgatagcgtcgagccactgttgttgtggtgtaccaaagttaatcgctactttttctacaccggtggggatcaccagcagatctgcgcctaactgactggcgagcagcgcggaggccagatctttatcgatcacggcttccacacctttcagttgttgcccgtctcgcaccaccggaataccgccgccgccgcaggcaataaccagatatccctggcgcaccaggtgagcgatggtgtcgtgctcaataatttccagtggtgcaggagagggaactgtacgccgccaaccacgcccggcgtcctccatcagcgtccagccgagttgttgttggcgttgttgggccgttgcttcatcgagaaacgcgccaattggtttactggggctggcgaaagcatcgtcatgtgggctgactcgcgtttgtgtcaccagggcaattaccggtttgtttatgccacggcgagccaattcgttatgcagcgctttctggaacatgtagccaattgcaccttgtgtatcacccacggcgtaatcaagtggaaccggagaaacttcgttactggcgagttcagagcggcgcagaataaagcccacctgcgggccattaccgtgggttagtaccaggtcccatccggcttcaaccatatcaacgatatgctgcacgctttccatcactgcaacatattgatcgggaatactattgcgttgctcgtcctgaatgagcgcattgccgccaaccgcgacgacagccagtggcttaaccatgatggttctcctttgcgacgatctccgccagtgcacgtacagcggcgacaaaacaggccatcggcgcagtggtgatcccggcaccaatttgcccgacccccgcttgtttgtgggcgatacccgtattgatgaccggtaaaatgccgcgatcggtcactttacgcgcatcaatccctgctgcggtgggggcaaaattgagggctggaagtgtaaatgcggggttaccgccgagggtgatggcttgcatccgacggctgttattggtggcatcgacaggggtgcctcccacaaatttgacgatcgccggagacgacgccatcgcgaagccacccacacctgcggtttcagtaattgcgctatcacccaggtcagcagcagcatcgtcaacgccaaatccggggaagaacagaccttcaacggcattggcaggagcctggaaccagcgatcgccagtaccggaaagccgaataccaaaattcaccccgttacgcgccatcaccgtaaccattgaactgaacggtacattggcggcggcatccatcattgctttacaggcagccatcgacagattgaggaagaagtgatcgttaccggtgataaatgccacgacgcgctggatatgttcctgtggaagagagcaggctagcaatgccgggagcaggcgcttaatcagcaaaccggtagcggcagcattgcggttatgaacttcatcccccatatgcagcgcctgcgccattaatggcttgagttccagctcgccgtgttgtgcgattgctgctttcattgctggagccagttcatcgcgcatccaggccagacgattgagaacttcatcgttattggcgccaaaacggagaaccttacccagaccttcattgaaattgctaaaagtacggtggccgttggttttgttttctaccacccataacggcatcgacgggctgatgatgcctgccattgggccaaccgcgtgataatgatgacaaggggcaaggtcgatttcgcctgcgtttatttggttttcagcgtcttgctggctggtggcccaaccttcgtacagcatggcaccaataatcgccccttttaccggaccacacatctcttcccaggcaatcggcgggccagagtgcaaaatacgtttttgttcagccattgctggaatggcctctttagcgagcatgacatccaccagcacgggctgtgcttcgagataacgtgccatggcgatttggttggcattttctaccaggggatgacatagcaacgatgccagatccaatccagcgtcaatatcgccttgtgctggtggctgccagttgagtgcaattgcgcttcccccggcatgttgaatattgtcagcaaaactgtgtagtcccgcgttcacgaccttcaaaggctgattaaataaggtattcatacgtttagcccctttttctgcaactgagtctgtgcaacggtgctggcccatagcgccgcctgtgcattgctgctggcgatgatgacgcccgcattttgtagtgcgcttatctgctgactgcgtatttgcggatcagcttccgttccgcaaacgtgcgcaatcagcaacggtgcgttattcatgtcgatgtgtgaaagttggtccagtaattcgctggcaggcgtcgtggaagcgccataaccaagtaccaggtcgaataacacgacggcagtgtgtgagtcgttgagttcgttgagcagacgttgattgcgcagagtcgggtcgatcattggatgcggtttgccacgggtgaaatcatcgtcgcccatatcgatcaacgtgtgatcttcgctttgccagatatttgccagagcacgattacccgcaactggcgtattggaagctgcgctgaatcccttttgttggcagataagttgcgcttcgtagcagaaggttcctccggcgaaaacaccgcgtatcgcctggcgatgggctggcagacgctggcaggcgttttgtaacattgtgagatcgtcgcaggaaatctcggtctcgacagccggaagtggttgatcattcagtaacgccacggcgatgttggcggcgctggcaagtgtggtggccgcggtgatattgggacgtgccagatcatgcggattcgcaccgaggaaattcaccactacgggttttccacaagcctcggcacgctccagaatagtccgggcaacgatcggtgaaggcggttttgatataagcacaatcacgcgagtttcatcgtcttgcgccagcgcatctaaagcgaagagcatcgatattccaccaatctcttcactgagatcatgtccgcctgttcccaacgcctgagaaatacccgctccgagctggtcgattcggcaagtcacttcctgtagcccggtgcctgacgcgccaataacaccaattgctccgcgtttcaccacattagcgaagcctaacggaatgccgttaacaatggcggttccacagtcaggtcccattacgatgcgctgacgttctcgggcaagcgttttgatggatttttcctgcccgatactgacgttatcgctgaacatcatcacgttcattccgaggtttaacgctttcattgcttcggcggcggcgtagtctcccggtacagaaatgagtgccaggttggcttcgggttcggcttccagtgccatttccaggctgaccttttccggtgttttaatgccactatccgtttcatcatcgggtttgctggtcagacgttgctgggccagtaccagtgcttcattgcaaatatcttcttcacccatgactgcaatcactaaatcattgggactggcgttgatttcgttacccagacccgcatcgcgcaattgttcgagattattgggcgttcccatgacgaccgaggcctgttgaataccgggcaacttgctgatttgcgcggaaatctgcatcagagaaactgagtcctgataaagattactgaaaactttatatttaactttcatgctgttacgcctgtttcattccgcccgatagcaaaattcgggcaaagcatccccgtgtagccccataaacgggctacgggagaaaaggttgaaatcaattcatggtgttcagggttcgaaagccatgcagcattcctgcaaggcaatctactcctgacgttgcgccaaattgcatgacctgttctgcacaggatgcgattgtcattgccgatgcgctcccaaccagttgtgcgagtaactggcaaatcggttctgaaaaatgtccctgaagcgcacgctccagataatgacgactgatatccgtggtgttgtgcgcatgttgatcaattgcctgctgcaaccggtattgatgatcggcaagtggtgcagggagttgccataaccagagcgctgccagatagcccaacaaatagtcatctccatcgggtgttaagcctttaccaaagccgatcagttgtggcacctggcgttccagcgcatctggatgttccataatcgctaatccctggtgcgtgaggctatccggcaggtgcaatgtgctttgaacgttatgttccagacaaaataaaagccgttgcgatgccatcgttgggtagtgctggaaaaccaaagggaatgcctcaagtgtcagcattctccccacaaatggcgactgccagagcgttgcgttttcgagcgccacacaaaatcgaggtgtccgcagtaagccttgggttaactgaatgggatctgaatgggcaatctctcttcgccagtcccaacattcaggtagccagactctggcagcatcagggagattcagatacgtttgcgcacacaacagagtgatgaatgttcccgcgtctgaatacagatttaccgcatgtttaaaagcgctatgcagacgtaaatcttgcgtttcattctgcgggaaaagatatcccaacgacgatgcgcaaagcgtaacctgtaccatcggcgttagccttccagacctgcaataatggctttggaatcagtaacccaaccgaaaatggcaccttgtgctttgatcatctcaagggcgtatttctggaattccgggaaataggagccgacacaatcttccgggataatgcattcatagccacgatcatttgcttcgcgcacggtggtggttacgcaaacttcggttgtaacaccacaaactatcagcgtcttgataccgtggttttgcaaaatcagatgtaagtcggtttgataaaacgcgcctttgccaggcttatcaatcaccggttcgcctgccaccgggtacagttcaggaatgatgtcatgacctgcttcacctctgaccagaatgcgtcccatcggtcctggttcaccaataaaggtttttccgccgcgcgtcagtttggctggcgggcagtcgcttaagtctgcacgatggccttcacgagtatgaataaccataattcctttttgacgtgcggctgccagcacctctgtacatggtgcgatagccgtgcgtaccagtgaaacatcattgcccagtgcctcaccgaagccccctgcttcgacaaagtcacgctgcatgtcgatcatgaccagtgcagttgtgcgcggatcaaaaggtaattcaaagggttgagcctgaaaaatggattgcgtcatggtaaatctcctgtctgatgtttaaacgatccagttgttctgagaacgagtattcaggagaaaagcggcacaaaacaggaaaaaagtttgccgcacagcaacgaaatttttgcattcagcaggtggtgtgatgacgaatgtgaagggagtcaaagagtggcatacagcaacaaattttttgatgctgtatggttttgagattaaaaaaatcgttgaaattgtgtgagcttaatcatcagatttagcgactatggcgtt

SEQ ID NO: 190 - DNA, 5596 bp, Escherichia coli
aaaaaaacgctccccaacttcggggagcgatatcagttattgacgccgtaaacgcattattttgcggattattggcgtcagtagcgtaaaggctgccagagtcagcaatgccagagtgatcggtcgggtatacagaaagtcgagtgaaccccctgaaagcgacagcgcacggcgaaaattactttccgccattggccccataatcaatgccaggaccactggcgacgccggatatccccctttctgcatgaaatagcccactacgcccgcaatcaacataatgccgacatcaaacaggctgttgttcagtgcataagtcccgaccacacaaagtgcgaggatcatcggtgtgagaatattgccgggaattttcaccacattaccgatgactttcaaagagagcagtccaagaactagtagcatgaagtaacagaagatcatgccgacaaacagcgtataaaccatatcaccgtggtcggtaaacatcagcgggcctggttgcattccctgtaacgttaacgcgcccagcatgatggcggttaccgcatcgccagggatccccagcgtcagcataggtaacaatgcgccaccggtgcagccattcgcgcctgcctcacaggaggccacagctttaatttcacccttaccaaagttttctggtgtcttactgaaacgacgagtttcgttataggcaacaaaagctgcaatatccgcccccgcaccggggatcatgccgataaaaacccctaatcctgatgagcgcaaaatggttaatgcgatgcggcgtagtgtttgccagggcagtaacagactgccgatagccaccttcgcgccccgacgaatttgctggttttgctccatagagcggaatgcttctgaagcagcaaataaaccaatcatcaccgggataaatggcacattcatcagctccacaaatccacctgtaaaccgtggaaaaccgcccattggatcaaggcctatcgttgcgatcagcaatccgccaaccccggcaatcagccccttaatcagcgactcaccggaaatactggcaataatgctcagtccgaaggttgccagggcgaaggactccgaggcactaaatttcagcgcccaactggcaagtaccggagagagaaacatcagcacgataatgctgagcgttccgccactaaaggaagagaacgtggcggcactcaatgccagccctgcttttccctgtttcgtcagctcataaccatcaatagcggtggctgcggcggcaggcgttccgggaattttgagcaaaattgcggtgatagaaccaccgtagacgccaccaaaaaagacgccgcaaatcatcaacaatccagaaacaggctccatgccgtaggtgaaaggcagcaaaatcgccacacccatggtcgctgtcagaccaggcaaagcgccaatcacaatacccagcatcaccccaaaagtggcaaacagcagcgcctgaggattattgagtaatgtcgaaaaaccctgagttaaaagttcactttcaaacattgctggcccctgttattcgaaaaatgtgccgacaggcaatggcacctgtaacgcttcgacaaacagcaaccagaggattgccgttaacagcagcgcaatacccggtgtgagtacccatcgcctgtagcccatcaacgtcataatgacgatgaggaaaacaggagtagtaatgagataaccgcagtagctcatcgccacaatataaaacgcggttgccgcaattcctgttgctgttttcctgaatgccggtttttcctgtgcgttggcgcaagaggctggttttgcctgcaaaagatcgcgtatcaccagcaagacagcgagcacaatcagggcacaggcatagaaggtagggaaggcacttgcaccgggatccgtttcaatggcagttgctggaaaatcagcggcattaatcatcaccgcgccagcaaccacacaaagtaacagcgccaccaccatcgttgatgaaaggcgcttgcggtgcggtacggcgagttgagcaacagactgttttgtgttcatcaaccgtacctcaggtttattttttcaggcccaggcgagtcagcaactcgtcaaagtacttttcctgttcgctgatttgggtctggaagctggcagcgtcaagccatgcatagttgagattcaacttttgcagtgcatcctggaatgcaggctcttcagccgtctcttttgctgcctttgccagaacatccaccacatcctgcggcgttttttgcgacacaatcaggccgcgccaggtgccgatggagagatcaacgcctttctcttttaacgtcgggacgtcaggcatggttttcattcgctcatccgccatcactaccagtgtcttcagcttgccgccattcacatggttgataacttctcctgggcttacggaaaccgcttcaatatgcccgcctaacaggcctgtaatggcaggggctgcgccgtcatacgggacatgagaaaactttgtgcccgttttgtcttccagtgcagctgccgccagatgccagatagctccggtgcctgagttaccaatgcgtacttttccgggattcgctttggagtaagccataaattcttcatagctattccacggcgcatcggcacggactgtgatagcagccggatccgcattcagacgggcaatgggtttaaagtcgctggttttaaaacgcaccattccgaggctgggaagggtggtcagttcaaccgtgcctaaaccaattttgtaaccgttagggcgggcagcggcgatttcactcaggccgatagcaccgcctccgccaggtttattgataaccccgatgctgacgggtaaatggtttttggcggcatcagcaaaggcacgggcaaccagatccgtaccgcctccggcagcgtagggaacgactaactcgatctgtttggttgggtaggaggctgcctgtacaggcgcaatgctgagggcagcgcctgcaagaagtaccattgcagccatttttttcggtaaggtaagatgttttatcattgcttttatatccttatttatcagttagttgctatttaaattgttccatgcgttcataaacagtactgcattttcatagacttgctctggcgtcatgccggggcgatatagcgcagaaccgaggccaaagccgtttgcgccgtggctcagataacgcgccatggtttccggtgtgataccgccaaccggtaacatcggaacggattgtggaataaccgcacgccaggctttggtaacttctggcgtaatttgttcagccgggaacagcttgatggcattagcaccatgttcaatggcagcaaaggcttcggtgggcgtggcgacgccaggcgcacaatacatacccagcgcacgggcgcgacggatcaccgcagtatcgcaatgcggcatcacgataatctggcccccagcctctttaaccgcaaccacctgctctaccgaaagcacagttccggctccgaccaggcagtccttaggcagggcgtcgcgcagtatactgatactttgcaacgcctccggcgagttcataggaatctcaatcaggcggaatccggcggcgtacagtttttcaccgatggcgacaatctcatccggtttcacgccgcgtaaaatggcgactaacccggttttttgcaaaagcgtattaaatggcatgggtacattccctggcgttggtggacagtaacccggcagcgtgggcgattcgccataatccctgttcagtggcattaggaatggcgtgtatctgtctgccgggaaaaacgtggctgaatgcttgtgaatagcggctgttcagatttgcgctaccgattaaggcgatcggtgttgtggcgggtaaatcacgtagcaaactggatgccagaccacataattcatggcctatcagtaatccggaaaggtaatccccctgcgaggacgacgtaagattactggtcagcaggcgcgaacgggtcgaaaacagcgtcgataataatccggtctgatgatgctcttgtgctgctgtcagcccgtgggtgaaggcatcccagtgcggttcatctccaggatgcatggtggcaccgagaatcgaatggcgggataaaacatcaaataactcgcccgtcataaaggttcggaaatcggtaatggtgttgttttcaactactgcccatttcgcatgtgtgccgggtaagcctatcagcactggcataccctgatggatcgcgttttgcagggccggttccatcgagatagcaccgaagatttgtgtttcttcgccacgcatcacttcgggcatttcaccttctttaatcacgccaggaatgatatgcagcattgtctgctgctggtggataacaggcgtcaactgcttcgccagaccctcgagagtgaccgggcaaggtaaataagctgctgattgccacccttgcgcactgccgagcatgccgcaagccagtaccgggcatggggtttgtgccagccagtcgccgcagacacgtaaaaacgtatcgtggaaagcgtcctcacgtgttgctgcctgggagggtaatttcatgatcccccaggggaattcacgtttttcttgtggatttggtgattcgccaaaacgccatgcccgaagcgatgacgttccccagtccagggcaataaatgagggtgctcccggcattagtcgtttcctttaatcatggtttatttatctttgcggacgtgcttaccccagcccagttcagcggatatctcttctgcacaggatttgacgtaaggtgccagttcttccagacgcgccagcgacatatacgtggtggtactggcgacagaaatagccgccacaatttcatcccgggcgttgtaaaccggcgctgcaacgcaacggatagtcggctcgttctcttccagatcaaaagcaaaaccactggcggcataacgacgcatgttctgaataaatgtgcccagttttgtttcatcaccacaggtcttaaacagcgtgcgccactcttcttctgttcggttgaggatcaatgccttgccgatgccggtgattgccagtggcatgcgatggcctgggcgtgagcgcatttccagcccgcgctgactgttgatcttctccagatacagcacttcgtcgccttcaacgatccccagatgcacggtgtccagggtgtaacgggcaaggcgttgcaaaacgggctgggcaatttcgtacagcgaggtgctttccagtgctctggcaccaaattcgatcagtttggcacccagttggtagccctgcgttgggacatggcgcagatagcgttgttccaccagaacggtgactaaacgatgggttgtgctccgggtcgtgccggtgaactcgccgatactttttaggtcatggcagccgttataaacagcattaagaaccgccagtccacgtaataacgtttgtgcgcctgcggtggttgaagaggtttctgccatacgtttctcctgatgatattgctgaagtgttccacataatgacgtggggaaaaggtgatatatcccacaatataaactccatctcatattgtgggataaaataatgaaaattaacgatcg

SEQ ID NO: 191 - DNA, 8635 bp, Escherichia coli
tttcaatttcaggatacttcttgctcggcaaccaccagttcaacattctcttcacttaacaactggcagaaagaattgggaggcggggcatcagtaaaaaaagccctgacattccgtgcattgccaattgaaacggcagcagacgcggtaaacttcgtatgatcggccactaacaatgtattccgcgcatgtttaatcatcgttctcgcgactaacgcttcattgacatcaaattccagtagggtgccgtcatgttcaatggcacctatactggtgattaaataatctgcgcggaagccttcaataaaatcacggttctgggccgtaatccaccgtatgagcrcgtaaagtgccttycggaaccatcacttcaatatcctgattcttataaagaatctgtgccacacgcaggctattagtgataatgcgtaaatcacgccggttgagtaatgccctggcaacggcttctacggttgtaccgatggtgataaagacggtacagcgttcgggaaggtaatcggcgactgcctcagcgatcgcccgtttctcggcggtgagcgaaagttcccgttgctcaaaagcggtattcatgacgctggagacgcgcccggcccctccatgatgacgggtgatcaagccctgctcactgagttttcggatatcccggcgcacggtttgcgttgaaacatccagcagttgtgccagttcttcaatattcatataaccgcgttctgcgattagatgaacgagttggtcatggcgtggattacctgtcacttcgatgatactcatgaatactcccttgcccctcctcggtagatgtttaccattttacgcataaagtgacaaaaatgattcggtttgctcacgattaggaatgccggcccgaccgccaggctgggtacatttcatcgcggcaaccgcactggcaaaacgaatagcctcttttgttggcattttttctgccaacgctaccgcgagtgcgccgtgaaaaacatcgcctgctccagtggtatcaaccacattgacagaaaatgcctcctgttgacacaaatgaccatcttcaatccacaacgatccttcagaacccagcgtaacatacactttacctgctgtttgtgtcgttgcctggaacaaaccttcttcaggtgactgcaggccagtcatgcgtttcagccctggtgttgagaacacggcgtgatcggcaagcgcgacaagtggagaaatatcctgcggtgtcatatcggcgtctaaaagcgttgtcacacccgcaaggcgcgctagcgagaatgctttttcagtaccgctatgccagcgaacatcggccagaatcagatcataacgagagaaatcgatcgcttctaaccattcggcatcagtaccgagatcaggacttggataattaacgataatccgttcgccatgctgatcaacgaggatcgctgattgcgacgaacgggcgttaggatatcggcggcaaaatgcggtattgacgccccaaccctcaagttctgcaagtaaggtatttccacaactgtcatcgccgatgcgaccgatgaaatcaacctccacgccaagctttgcgattgcaacagcggctgttgctgccgggccgccaccaatctcaagataatgatttgcctgatatttcccgccaccctccggcagagtgggcaaagaataaattctgtcctgaactgtgatacccacgcatgcaattctggtcatatttgtcttgtcctgtttaattttgtcgtctttggtcaatttaaatgacacaaatgatcaaattagtgatgcgtgtcgtgtttttgaacataaattacaaatatgctcaaaaacagacgaaaacgaattttcaattgtcattattttgtcaatgtcagacaggagagtattcatggcaaccattgcatttctcgggctggggcagatgggtagcccaatggctaacaatctattgcaaaaagggcattcattacaggtatttgatgtcaatacacaggccgtcgatgcgctagttacgcagggggccactgcggcacaaaccccagcggaagcggcagcaagcgctgaatttatcatcactatgcttcccaatggggacattgttcgacaggtgctgttgggggaaaaaggcgtctgtgaaactgtttcatctgacgcgttagtgattgatatgtcgactattcatcccttacagaccgatgcattaatacgggaattacaagaaaaaggcatcaatatgatggacgcccccgtgggcagaacgtcagtgaatgcgattgatggcacattgctgattttagcgggcggcactgatgagcagattgcgcgtgcacgcccgattctcatgtgcatgggtaatgagctggtcgaggctggtggcccaggaatggggatccgcgtgaagctaattaacaactatatgagcattgcgcttaatgcgctgtcctccgaagccgctgtgttatgtgagtcactgggattaaatcttgatgtcgcaattaaggtgatgagtggtacggcagcagggaaaggacattttacgaccacctggcctggcaaagtgctgaaaggcgatctttctcccgccttcatggtggacctggcattgaaagatctgcgtattgcagttgacgtcgctcggaaaacgggggcgccgctcaatatggggattgcagcagaaagttattacgccgcagcaagtcaagacggcaaagggcggcaggactggagcgccctgctaaatcaggttcgccagcaggctggtctttaattttatctattaacaggagtttctatgtcatcccacttcaccccatttacgctgaaagatatctcccgcccaggtggtggattcgccatgttagctgtcgatcagcgtgaggccatgcgcctgatgtttgcggcagcagggcagccaaaacccatcgccgacagtgtactcaccgattttaaagttgccgcgacccgaatcctttctccttatgcttctgccgttctggcggataaacaattttgtcttgaacaaatagtcgagcagggcgctgtggctaattcttgcggcctgattgtcgctgccgatctttttatcccaggtaatggcatcccggttgatagcgttgaaatagatatgtccgtcgacccgcataaagcccgtgaaatgggggctaaggcaatgaaattacttgtactctggcgtgaagatgaacccgcagaggaacgtctggcaatggttgataaatttgttcgtcgctgccgtagtgccgggctggttagcattattgaacctgtggtgcgtccacctcgtcgcggttgggactttgatcgtgaaagcgccattgttgccgccgccgcagagcttggtggaacagaggctgatctttacaaagccgagatgccattagggggcaaaggcgatgaaaaaaccttacttgccgcctgtcagcaacttaacgatcagatgaagatgccgtgggtaattctttcttctggcgttgatgccgatatttttggccgtgcagtaagtattgccatgaaaggtggtgcgtcgggcttcctggctggacgagcggtttgggcgtcggttgttggtgcacaagatccacaaaccatgctgcgcgatgtctccgttccacgcttgcaacggctggctgaaattgtcgatgaaggtatcgcgcaacgctaatcccctatggatatcgattctggagaataacaatggataaaattacccaggttttattttcagatattgggaaagtcaccactcaatatgttgaagtaccacaccagcaacttaaaccgcacgaagtacggattgcgcccgtgttctacgggatatgcggttcggatctgcatgttctgaaaggcggtcatccgtttgccaaaccgccagtcgtccccggtcatgaaattgcagcgcgcgttacggaagtgggcagcgacgttaaaaatgtacagccgggcgatcatgttgtggtcgatcccatcatggcttgcatggaatgccgagcctgcaaagcaggacgttttaatctttgtgaaccaccgcaggttgctggtttccgcgcaccgggctttgctcgctcacaacacattgttcctgcgcgtaattgccatgtcgcaccagcctctttaccgctaaaagtgttggcctttgccgaaccggcggcttgtgctcgtcactgcgttaaccgaatgccgaaagcttctctggaaagcgtactggtgattggtgccggaacgataggcttatccatcgtgcaggcactgcgcattatgggggcaggtaagattaccgtgattgaacctgacgctgccaaacgcgcgctggcgttaaagctgggcgcagcagaagtttgggcaccaggtgagctggccgcagatgtgcgatttacgggggcgattgatgtcgttgcagcgcaggccacgcttaacgatgcatgtacccgtgtatatgccggaggcaccgtcgtgtgcatgggcgtaccaagtgggccgcgtgaaataccattaccgatgatgcaacgtttcgagcgtgacttgctcaactctggcatgtacatccctgaagatttcgatgctgttatcgaatggctggcggatgggcggtttgataccagtgaactggttaccgatttatttgccattgaggatgcagcggcggcattcgaacgcgcgcagcaaaatgattccataaaggtcatgctgcaatttgcgccggaatgattttctaaatctctgtctggcgctgcgtcacgccagcgccaccctacaacaattaaaaaggacactgcgatgagtcaaatcaccagtcctgcaacttattcaattagtcggccacaggacgtaattgatattgttaataagaactctgcaatcaacaccagtatcggcgttatttttattgctttgggcggcatattgattgatgcctaccaggcggcgatggtggggtttggtaataaatacattgccgctcaattcggcatttcgccgggtcttgctgcaaccgtcaatgcatcagtattaatcgccgcgttaattggcggtttattagcgaaccgagtaataaaccgctttgggcaaaagcgggcatttattattggcatggggctgtgcaccatcggtgctgcagcggtagctattgctcccagtatctggtgggtgctggtgtgccgcgtcatcatgggctttggtttaggcatcgacttccctttggcaaccaatgccgtggcagagcttcgtggttcaacgtcgaagaaaaccggcacgtcggtcaacctctggcaaatggcctggtatgtttcgacaaccgttgtttatttggtgcttttgccgctgcttctgtcgggtatcgctgaagaacaattgtggcgttacggaatattcatcggagctatttttgcagtcatcttcatgattttgcgttacttctttattggtgaatccgcaatgtgggccgcacgcgtcgggcgttaccaggaagcgtgcgacattctgggaaaacgttatggtgttcaggctcgcgttgcggcatcgggtacaacagaagcgaaattctcggaaaaagcagagaataaatacagtggtggatatggcatcttatttaatgatcgttaccgcaaacgcaccattcttggctgtgtcgtggcaaccatgcaggcgtggcaatataacgccgtaggtgtttatcttcctcttacgttggcgggaataataagtggcgggcttactggcgcgttaaccggttctgccgtcgtgaatgccctttgtggggtgacaggcgggatgatcggctcgtttattctccaacgactgggtactcgccgacagtcgatgtatggatttgctgttgtgaccttagcattgctgtcgttaggcgcactggcaacgactaatccctggctgtctttagggttattgggatcaattattttcttccattcagcgggtcctggtgggctgggcatgaccattgccacactctcttatcctcccgctattcgccctactggggtcggatttgcccgcgctattatgcgcacaggggcaattgcaggactcattttctggccgatgctgtggggtgcgttgaaaactgaagcgttttactggttggcaatcgtgccattcctgggattcctgacctgtgtattgattaattgggaaccactgggtgcaaatgttgatgctgaggacgcagaggttctggctgaattgaagaaataatttaatgcgcatcggtttaagccgatgcgcattaattcaaactgcccacgtttagtggttcgtatcccagatttctcgcctaccaggagaggaaaattatgtctgaaaagttacccgcaccgcgtgaagggctttccggtaaagccatgagacgtgtcgttatgggcagtttcgcaggcgcgttaatggaatggtatgacttctttatttttggcacggcagcaggactggtatttgcaccgctgttttatccagacagcgatccttttataggtcttatagcttcctttgcgacctttggtgtcggttttctgactcgtcctttaggtggcatcgtctttggtcattttggcgataaaatagggcgaaaaataacgcttatctggacgttggctattgtcggttgctccacatttttgattggttttattccgacgtatcaggaaattgggatctgggcaccgctcatattaatggtgctacgtttaattcagggctttggtcttggtggcgagtacggcggagcggcattgatgaccatagaatcagcgcccgaatcccgacgcggatttttaggttcactcccgcaaacggctgcgtctgtgggtattatgctggcaaccggtatttttgctctctgtaaccattttcttacttcggagcagtttctctcctggggatggcgcattccgttttggctttctgcggtgatgttgatcgttgggctgtttatccgcctgcataccgaagaaacgctggattttcaaaagcaaaaaacgacgaataataaagaaaagtccgttcctccgttgattgaattattcaaaaaacatccacgaaatattttattggcactgggtgcgaggctggcggaaagtgtctcctctaatattattaacgcctttggtattgtctatatttccagccaattagcattgtcgcgagatattcccctgacgggtatgttgattgcctcggcgatcggtattttcagttgtccattggttggatggttatcagatcgtataggtcaaaaaagtctgtatttgtcgggagcaggattttgtgtcctgttcgcgtttcctttcttcttattactggatagcaaaagtacgctcatcatctggtgcagtatgatcctcggctacaacttaggtccgacgatgatgtttgccgtgcagccaacacttttcacccgcatgttcggtaccaaagtacgatataccggcctttcttttgcttatcaattttccgcgattcttggcggactaagcccccttatcgcctcaagtttgctggcgctagggggaggaaaaccgtggtatgtcgctctgtttttatttgctgtctcagttctttcctttgtttgcgtctggctgattgagccgaccgatgaacaagaaaccgcttcttaccgctacatcagggaacaatctcatgaaaactgaacgaaaaaacgagcattacctggcgctacaacaggcgtttgacgcgccatggcctgggcctgtaggagagttagtgatgctggaaaaaggcaatattcacctgcagatttatccgcatgatggtgccaggataacctcgttaaaggcatttggttctgaagtattacgccaatggcagccgcagcgcagagcttttcagtatggctgtttcccaatggtgccgtgggcagggcgactggggaatgcgacgctgaatgctggtgggcaatgttattctttacccgccaataaaccaccacatgcgttgcatggtatggcttgttactcaacgtgggaaatcatcgacaaaacagcagattccctgactttacgtatgcccctggcttcaccgtggccctggcaaggggaagtgattcagacttttttgctggagaacgatgcgctggttttgcaactggaagtccattcatatgccgatacattcccggcctccgcaggctggcatccgtggtttgcgaaaaagctgactccgcaaaatacagaatcgttgcaggtgctttttgatgcggactggcaagaagaagcgggtagtgatgaactgccaactggaaatcgtatctctcctcaagttggtccctgggatgactgttttggtttttatgacggggtgaaggttaagttactgtggcctggtaaactcgcgatgaccatgacctcttctgcaaacagtctggtggtatttgataaacagcccgatgccacctgtattaacccgctgactcaggcacctaacgcaataaatctaacgccggaatttgtgacaccagataagccgctggtcatcgaaactcgttggcaatttacacctgaatcttaaccattcatctattgcgaaaaagccagtgaaattactctgctttttcgcaatcagcatcacaagattaccctta

SEQ ID NO: 192 - DNA, 2672 bp, Escherichia coli
gggcgttttacttgactgaaaaggttttcaatctgaaaaccttttctgggccctggtccggagttaccttcccgctctccaggcaacatcccgtagcgccgatcgcgcagcctcactgataccacctaactgaaaaaatccgtggataacgccaaggtagcgttggcaggtgcattgcactccttgccctgtcatgcggtgatacaacgcttcaccttcatcgcaaagtgggtcgtattcagcggtaatgatatgtacaggtggcaagccattgaaatcattgcgccaaatagggctggcttcaggatgcctgcgttcaatgcctggcaggtacatctcaaagccgctcagtaaagtgtcgcgtgtgatgatgtaatcgtgaccattgcgtatgtagctttcgaaatgcccagtcgcatcaagcataggataaattaagatgagttgtgctggttgccactcgccagcacgcttcaatcgcaaagcagttaccagcgccagatgcccgcccgcactgtcaccggcaagagttattcgttgtttatcaacgccgagtcgttcggcgtgttgccggactaattctgcacctcgttgtgcatcatcatgggcggcggggaaagtatgttccggtgccagccgatactggacggcaataatccgacattgcccgtaataggctaactggcgcagctggttgtcgtgagttgcgaacccgccgctaacaaaacagccaccgtagtaataaattatcgtcgggagtaatgtcggggcattcagcggtgacactattcgtaaggtcatcccttcaagttcgatagtctgaatatctacccgcgtttctgtctcacccgcaaggacagcgctggcgatatagccctctctgcgctgcgtaatactttgttggcgcgatgaggggcgacccgcagcgataaactcttcgactaactctgcaattcctttttccagtgccatagtagaactcatttttgctgtatgaatgtacagttttatacacccgtttttgctggatggatacagggaaattcacgggcgtgaaaaatctggaaagcgcctcgcaaatgtaaagacaaacccggcagagacgtggttttgctggagcactatcagtaagctagtggtttcaatggtacgtcaatgacgtacaaaaaggattgttactctaagccaatggcgtataattatgctcttcatcgaaacggaaatttttactgaagatgttcaaaaactgctgaacgacgatgaattcagtcgttttcagtttttcctggccttgaatcctgactatggtgaggtaatacctgaaactggtgggttaagaaaggttcgatgggtctcaggaggaaaggggaaacgtgctggtgtcagggttatttactttcatcaggttaaacattatgagatcagattactgcttatttatcgtaagggtattaaagatgatctgtctccccaggaaaaagcaatgctccggttgttaaatacgaggtggtaaatggataaggcactttttgagcggttgactcacagcatggcccagatgaatgaaattattgaaggaacgcgacagccttcacggacttttgaagttgatgctatgaaaatcaaagaaatacgccgcgcttcagggttgtcacaatctaaatttgccgatcttatttccgtaagcgtagacacgttgcgtaactgggagcaggggcgacgttcaccgaccgggcctgcaaaggctttgctgcgagcgattgccaatgatccgcaacatgtgctgcaagcacttaaccgttagaggcatggttatgccatacagaaagcaccagcattcagaactcctatgaaagcggcatagtgccgcctgctcaggagttttgctatgacccgtaatcgtgctgaacgtcgccatcatatggtgcgattaaaaaaaatccgctgtcgttatcgcactgcaggcgatggaagcaaaaaagcatcaggtatttgctttcgtactccctgtatttgttcttgttggatgtgtgggcatcgacgctatcataatggtccccgcgtatcggaaattcgtgcaaaagcacgctatgcgaattaagggaaaatgatgaactattttaaggaagcacatttttagaactcttaacaggagactaaaaatgtccacgtttaatacgcgtaaagatagggatcgtaatggtaaagcgaagccgcataagcattcagggatcccaacacttacaggtaaatggcgtcacccttcaatggattgttgggtaaactacagtacaccgggcgatcatgaatggaagcggctctatactacgcttcgccgtcgcgcagatgatcgacgccaatgtcatcgggtaatgcagggggatgatccggaaggaatcgtctggttcccggactgttatccacaaatttactactactaacaattaaagaccggttggtgcggcactgaccggtcgttatgaatggtagatttcaccttaaaccctggtgcggtaaagctgctgactttttcgggtacaccatcctgatgaagcaaatgaagacccaatcaaaaaatattcttgaatataaaatatttatagcatccataattcatccttattatttgttgtttcttttctgtagatgtgcccccgcttaattaaaagtaa

SEQ ID NO: 193 - DNA, 1833 bp, Escherichia coli
aatattacagttaattgtaatcgcggggcgggtttgtgatgagcacggatatgtcacgaagtcgtaacaatataaagcagagtgaaggataaattttgtgaataaagtatcattatttaatgattttgtgaatgttaaaatgtctcagataatttgtttaagcgttatttatatttgtggcttatgagtcagcgtgaatcatatctaatattttttacgatatttagttaaaaacggcactattgttatattcctcacgttccaggaaatcagcggatttactcatattatgcggcgggatactatccatcggcctgctgaagttggattaaaaattcgaaagtgcacaccttatatttctctatatacgtattccttttggaaagcgtagggtctcctttatttcagggaacgtaaataatgaaaaaatcgacattatctttagccatcggtttattattggcatgtagtaccggtatggcaaaaacacagcatttaacgctggaacaacgcctggaagcggcagaaatgcgggcagcaaaagcagaggggcaggttaaacagcttcagacacaacaagccgccgagatccgcgaaattaaaaccgcacagggcaacacgccggtaaacggtcaatcaacgacggagtcagagaagaaaaacgccaccccgcctaatctcctgctttcagggtatggcgatttaaaaatctacggtgacgtagaatttaatatggatgcggaaagtaatcatggcctgctggcaatgaccaacgctgatgtgaatagcgatcccactaatgaacagtggaatctcaatggtcgtattctgttaggttttgatggtatgcgaaaactggataatggctatttcgctgggttctccgcacaaccgctgggggatatgcacggttcagtaaatatcgatgatgcggttttcttctttggcaaagaaaacgactggaaggtcaaagtaggccgttttgaagcctacgatatgttcccgctgaatcaggatacctttgttgaacattccggtaatactgcgaacgatctttatgacgatggcagcggttatatctatatgatgaaagagggccgcggacgttctaacgctggcggtaatttcctcgtcagcaaacaactcgataactggtattttgaattaaacacgttactggaagacggaacatctttatataacgacggtaattatcatggacgcgatatggaacagcagaaaaatgttgcttatctgcgtccggtaattgcctggtcgccgacggaagaattcaccgtttccgcagcgatggaagcgaatgtggtaaataatgcttatggttataccgatagcaagggtaattttgtcgatcagtccgatcgtaccggttatggcatgagtatgacctggaatggcctgaaaaccgatccggaaaatggcatcgtggttaatcttaataccgcctatttagatgctaataatgaaaaagatttcacggcagggattaacgcgctgtggaaacgtttcgagctgggttatatctatgcacataataagattgatgaatttagtggcgtggtttgtgataacgattgctggattgatgatgaaggaacatacaacattcacaccattcatgcgtcttatcagttcgctaatgtgatggatatggagaactttaatatttacctcggcacgtattactccattctggatagcgacggcgataagatacacggcgacgatagtgatgaccgttacggcgcacgcgttcgctttaaatacttcttctgatgaaagggcggtgctggatattttccggcaccgcaactc

SEQ ID NO: 194 - DNA, 79 bp, Escherichia coli
tcagagtctgtgtgatgccggatgtgtatccgactcgtaggcctgataagacgcgcaagcgtcgcatcaggcaatcatt

SEQ ID NO: 195 - DNA, 7636 bp, Escherichia coli
gtgattattgaacaaaagctggcagttgccagcttttgttgtcacccctaaacctcttcctggggaagtggtgattgattgtcattttgcctttggtcagtgcccccggtaataagggggcttttgtgttgagcgatgaagtaacagagtgaatggtgaagttattaatgacaattacaaaatgacattaagtaacaatatctaaaatgtcacctaatttaaaattgataaccaatagtagtataggttccccatcctgtattttttaattcaaatggaccatctccgaagttaaccttctctcccgcattccattgtccaccgttgtgaaaataacgtagtgtaaatgcaaatttccagtgttcatatagaagggaaaggatatggcttgaagcaatagcattactggttcgtttattattgtgtgacttgtccgcaagatcggagccaaaatcaaagttagtaaaactattgtataccaatcgtcctccgaataaatttgtaagagggatgctatattttattttgaatcgatatccgtcccattcattttcattagcggcaccatagttttgccactgatacttggcgtatatattggcagaaagcttaattggtagacccgtgtcgatatctgtaccaagccccatataccatgtactttgccgggatgactggttgtcacccatatcatagacatagttgtttgcaatgaaccattctttaaatgggccgaacgcaagatttaatccggtcaatttgtcaatggaaaaccgaggttctatttccgtaaatagtggtgagccctcatcccagatcccaacatcatagtgactgccgacgccaaagaatttcggtagatcaacataaccataaaaatcaaaccagtcttttcttcctgctacagtatattcagggtagaggtcgttagtcagtcttgggccaaagcgagagtctgtgcgaccaatgacattcaagctttgatgtaaccagctttcatcaattttaatttcctgagcgtttccaatgcaaggtattaatagaatggataaagctatccagtgcttttttatatacataaatatatctcttatatattgttgatttagagagaaataatgtcatccagtgaatgaatggtattataagtttttgttatttgcttacttctacccgcatttcatttacctgtgcaggagtaatcttgtggcctttcttaaaataatcgattacgacattggacatgttatttccggcgcggacctggacatttttcccttctttgaatgccagaaaaccatcgcccccaagtgcaaggaaagtcgtagtcgcaacatggtaaatattcgtatcaacgatctcttcaccattaattttaaaagatacaatgcgctgacctactggtttctgcagggtatagcgcatttctgcgccttttgacatttgcaggatgccattggtaagcgatgccccgtgttccagtaggttacgcagatccttaccgctgagatccatttcagtaagttcattcttgaaggggaatgtactggtaatgtcaccaaaggtaatcgtgcctgcatttatatcagcacgtaaactgccggagtttatcaacgcaatttgtgcagtcggtgcagcgacaagcattgcatcggtaaacaggttgccaagttgcgatgactcaccgtaggcacgagttaatgcaatcgatgattcaccgactggttggcgtacaagatccgccagttttttattccagccattgataactttttgtgtggttggatcaggtatccattcatcggcataaaccgttttcagctcaaagctcttcactttatgagtacgagctgtagggttgacatcaaggattaatttaccaatatcgataccgccactgtcagtcgaaaggattaaggtgttgccgactttgattggttctggcgttccgacgtgggcatgcccggtaatcagaatatccaatcctttcaccttgcttgcggtttgaatatctttatccagcgcacgtctaacatctgtattgccaatgctggactgacgcgccggtacgccttcatgaaccagcgccacggtgaggtcaaccttatcacgtaactcatcgatataatgctgcaaatacttcacttcatcacgtgcttcaatcccctgattcttgagggtcgcggaagatttatcaaatcggttattattgtcattatcgagtccctggagagagagctccgagaccgtgtcattaaatgcaaatacgccgtgtagcccaacaataccaatcttgatgccatctttttccaggatggtgtagggcttgttccagaagggtttctcactctctttatgataaacattgcctaataaaacagggaaattcgctttgcttaattgtcggagggcattatcccagccatggtcaaactcatgattaccgattgatactgcgtcaaaaggcatggtattcataatatcaattattgcttcgccctttgtcaggctactgatatatggcccggtgaaatagtctccagcatcaaaataaaaggtggctttatttttggctttctcttgttttactaacgtggatatattggcaaagccaccaatgtcgcgttttccgtctgcgacatacggtactttataggaatccacatgagcgtgaagatcattggtataaataatcgtgacatcctgcgccataactgaggtcgaaaaaatagtcagcaatgttgcggcaaataaagtacgctgcgctgttttcattcgcattccttgttaaataaattgactgataaatgagattttatttggcgacgtccatgactcgtttagttaagtctggggtgacaggtttatgatttttgaaataatcgatgatagattccgccgaggttgttcccggtatcgtcttcacattttttccattcaaaaatgcttcaaaaccgtcaccaccactggcacaaaaggagtgcgtggcaatacgatatgtttgattatcttccacgggtttgccgttaatggtgaaagagattaaccgttggttgagtggttttttgctgtcatagacaaccgcaacacttttagaaacttgtaacacaccgttagttagattggttgcatgcgtcatcaatgatttgagatcgcggcccgtcaaatccatctcgatgaggtcattattaaaggggaatgtgctaataacatctcccagtgtgatatcgcctttaggaaaatcagctcgcatcccaccgctattttgaaatccggcaacggcatcaggtgttttttccatcattgcatcaagaataaggttgccggtagaagaggaactaccatactcacgtgttaaaactacgggagaatggccgacaacttcctttgttattttgttaagctttgcactccatttatcaatagtattttgaacgatggtgtcaggtttaaattgatctgcaaagatggtgattaactcaccattataactatcaattttcttcgttttcggattgtaatcaagcacaagttttccgatgttggtgccgtatgcatcggtagatacaattaatgtgttattaacttttattggttgcggtgttccgacatgtgcgtgaccggtaattaagacatcaacaccattcacttttttagctgtctcaatatctgcctgtagtagccgctccacatctttactaccaaagcttgattgacgcgccgggacaccttcgtgaattagcaaaacggtaatgtcgactttaccttttaattctgcaagtgctttatttaaatatttaatttcgtctctggcttctacgccttcacgtgcttttgccgcgactgtatcatagaaagcgaatgcgccatgcaatccaatcacaccaatctttaaaccatctttttcgataatggtccacggatgatcccaaactggtttattcgtatcggtgtagtagatatttcccagcagaatggggaattttgcttttgataactgagacaccatattgggcacaccgtgatcgaactcgtgattaccaacagacaccgcatcaaagggcatagtgttcatgatatcaataatagcttcacctttggtcagggtgctgatatacggcccggtaaaatagtcgcctgcatcaaagaaaaacacatctttgctttttttcttcgcttcattaacgatgcctgcaatattagccataccacctataagtctgttcttatcaacagcgatgatttttgccggattgacatgtgcgtgaatgtcattcgtataataaatagtaacgtcctgagctagaacactgtgagaaaatatcacgccgaatatgactgataatgttgtaaatacagttttcatcatccctcctggatagggtgtgttacatttgttgaattatttaaataaaaggcacatcgtgtcttattttatgtaagcatagttcagaaaagtattgtgtgatcttagtaacaaataatgttattaattaaacattgaccatgattatatttcacggtcatacatttatatatttaattaaatgaaaggtagtgatctctcttaatttatggtcgtttgtcgagtgtattgactaacaagatggagtgagcgattcattgtattttaacgccagtgaggtcagcatttgcgttacgcgacctgcggataataacgcgctttgggtaaagtcgtgttggtctgtcagccatgtgataaaacaacggactggttgccagagaaacatttgcgcccctttctaagctggctcccgtgagtaggcagaccatcttgcaattattcccctgctcccagcgctgccactgattttgccaccaaccatggtatgtcgttcccttaaaatgccagggcgtatcagcgttactgtcactgatttcttcttctacgaaccaaagttcaccttgttgttggcggaactgatctgcccaggctgtaataattgcgcctcttagaaaacattcgtgtgaaataatatgcgttttgacatctggatagcggattttcagtattctgaaatgcccgtgtgccgtgataaccgggcgtagtatggctcccttaccgttgcgcttgagtacagcactgccatactgaatttcatcgaactggctccggcgcaagaattgcgcttcacgcatatctaccttctgcacgatatcgcgatggtgcatagttggttctgtgttgcccttgtaactgtaccgcagactgtctcctgtctgatgttgcgtataattcgtggagagatgaagaatgttgccacgagtggcgtcaagactgactaaaacatacagtttttgtactgcgctggccccttgaaagggtatgaacagttgaacggtttcaatggcctggggatgcgtaatttctttctgatattttttaggcgtccagacttttttgcagttacggcattgaatgcgttgcgaaccctgtggattgtgaccataacaaatcatgtctgtgccataacataccgggcagaaatggcctttctcaattgcataagtagacaagtgaactgacaaccagtcacgaaattgttgctcgtcaaacaacggcgggtaactgccacatgcccgacagtgcagtgccggataacccagtttatagtctggccaactgtaatcttccgatgaggccaatcccaaatttcggcaaccgaacgttttacaggcattaatcgtaaacagagtcgacatatatcaccaacgatttcacaaggtcgttgattttgtccggcaactatcccctgcggatgtgattactctcacataaataagtctttcagaacgtaatgtagcaatcctttatctcactgaaagggattgtttatgaaaattaaaatacttgctgcgggtatcgcattaacactgccgttctgggcttgcgctaaagatgtcactatcatttataccaacgacctccatgcgcatgtagaaccttataaagtgccgtggatcgctgacggtaaacgggatattggcggctgggcaaatatcactacgctggttaagcaagaaaaagcaaaaaataaagcgacatggttttttgatgcgggcgactattttaccgggccatatatcagcagcctgaccaaaggtaaggctattatcgatattatgaatactatgccgtttgatgccgtcacaataggcaaccatgaatttgaccacggctgggacaacacattattacagttgagccaggcaaaattccctattgtgcagggcaatattttttatcagaacagcagtaaatcattctgggataagccatataccatcatcgaaaaagacggtgtgaaaataggcgttataggtttgcacggagtatttgcctttaatgatacggtatctgctgccacgcgcgtgggtattgaagcgcgcgatgaaattaaatggctacaacgttatatcgatgaactcaaaggcaaggttgatttgaccgtcgccctgatccacgaaggtgttccagcccgccagtccagtatgggaggcacagatgtgcgtcgcgcgttggataaagatattcagacggcaagtcaggtgaaagggctggatattttgatcaccggacatgcacatgtgggtacgccggaaccgattaaagtcggcaatacgctcatcctctccactgacagcggcgggattgatgtgggcaaactggttctcgactacaaagagaagccgcataattttacggtgaaaaacttcgagcttaaaaccatttacgctgacgagtggaagcccgatcagcaaacgaaacaggtgatcgacggctggaataaaaagcttgatgaagtggtgcaacaaacggtggcgcaatcgccggttgaattaaaacgtgcctatggtgaatcggcttccctcgggaacctggcggctgacgctttactggcagcagcgggtaaaaatacccaactggcgttaacaaactctggtggtatccgcaatgagatccccgcaggggcgattacgatgggcggcgtcatcagtacgttcccgttccccaacgaactggtgacgatggaactcacgggtaaacaattacgcagtctgatggaacacggcgcaagtttaagcaatggcgttttacaggtatcgaaaggcctggaaatgaagtacgacagcagcaagccggttggtcagcgggtaatcacactgactctgaatggcaaacccattgaagatgcgacggtttatcacattgctactcagagtttccttgctgatggtggagatggttttaccgcctttaccgaagggaaagcgcgtaacataacgggcggttattacgtttatcacgcggtggttgattacttcaaagcgggcaacaccattacggatgaacagctcaacggtatgcgcgtgaaggatatcaaataaaagtgcgcactgaattgactcaactgtttgttacccgttgattgcgcagatcctgtattcggcctacgcgagggcgcaggccaaatcagatgccttaacatcaccatccggtggcaggacgttgtttttcgaattagcccaggtgtcgctgtgttgtcagaatatgagtcaaaacgtgcgaggtggattgcgctatagagaaatcttttatcgcctctaattaaga

SEQ ID NO: 196 - DNA, 3101 bp, Escherichia coli
tttgtttatattgctcccctgaaaatggggagcttaccacgcctacaaagtgtgacacttcgtaggcggataaggcgtttacgccgcatcaggcagaaatttgtcagtattctggtgaccttaaatttaacgcccaaccagaaccattatttgtcacattcctttttattcttgcgtcttctttaccttcactctccccataaaaattatattttcaatacatcagccaatacatactttaattaattgaatataatttatttctattgttgtgttcatttttaatgattaatggagtttgttatgtgattatttaacgtgttgttttaacgatgatggctaattattcaggtggtttttgagggtgttttttctcctcggtagaaatttttatttttaatgtgatcacggttgaataatcactttttctctcttgtatggtagtaggcgtaaaattaagtttgaagtgtctatttacaatacaggagattgcaataatgaaaattattgctgtggatgtttttgttacttgtcccgggcgtaatttcgttacgcttaaaataaccactgaaagcggactttgtggattaggagatgccacgttaaatggtcgcgaattgtcggtcgcttcttatctgaaagatcatctttgtcctcaattaattggccgcgatgccagccgtatcgaagatatctggcaattcttttataaaggagcttactggcgacgtggtcccgtcacgatgtcggccatttctgccattgatatggcgttgtgggatatcaaagctaaagcggcaaatatgccattgtatcaactgcttggtggcgcttctcgtgaaggcgtgatggtttattgccacaccaccgggcggacgattgatgaagtccttgaagactatgcaaagcaccagcagatgggctttaaggcgattcgtgtgcagtgtggtgtaccgggtatgcaaaccacctatggtctggcgaagggcaaaggactggcgtatgaaccagcaaccaaaggcctgtggccagaagagcagttgtggtcttcagaaaagtatctcgattttacgccgaagttatttgaagcggtgcgtaataagttcggttttaacgaacatctgttgcatgacatgcaccatcgcctgacccccatcgaagcggcgcgctttgggaggagcattgaggattaccgcctgttctggatggaagatccgacgcctgccgagaaccaggaatgttttcgtctgattcgccagcataccgtgacgccgattgcggtcggtgaagtgtttaacagtatctgggactgcaaacagttaatcgaagagcagctgattgactatattcgcacgacgattacccatgcaggcggcattaccgggatgcgacggattgccgattttgcatcgctttatcaggtacgtaccggttcgcatggcccttcagatttatcgcctgtttgtcatgcggcggcgctgcattttgacctctgggtgccaaactttggcgttcaggagtacatgggctattccgaacaaatgcttgaagtcttcccgcacagctggcgcttcgatgaaggttatatgcacccaggcgatgaaccggggctgggtatttctttcgatgagaaactggcggcgaaatatccgtatgacccggcgtatctccccgtcgcacgactggaagatggcacattgtggaactggtaatagcggttcgcttaattattttctgaatattcatcaaatcgattaattccgctcaaggagctaaaaatggacgttgatgtgtcaaccagtgttgcgggtaataaaccgcaacggattcgtcgtattcagacagtgaccctggttttattatttatggcggggatcgttaattttctcgaccgttcgtcattgagcgtggcaggtgaagcaattcgtggcgagttaggattatccgctaccgagtttggtgttttgctttctgcattttctctgtcttatggtttttcacaacttccttccggtattttgctagaccgctttggcccacgaatagtgttaggcgcaggcttaatattctggtcattaatgcaggcattaacaggaatggttaattcttttagccactttattttaatgcgtatcggtctgggtattggcgaagcgccatttatgcctgcgggagtaaagtcgatcaccgactggtatgcgcaaaaagaacgcggcacggcgctggggatttttaactcatctaccgttatcggtcaggctatcgcgcctcctgctcttgtattgatgcaactggcatggggctggcggacgatgtttgtcatcatcggcgtagcagggattctggttgggatctgttggtacgcgtggtatcgcaaccgggcgcagtttgtcctgaccgaggaagaacggacatatctctccgcgccggttaaaccgcgtccacagttacaatttagcgagtggctggcgctgtttaagcatcggacaacctgggggatgattttaggtttctctggcgtcaattataccggttggctctacatcgcgtggttacccggttatttgcaggccgaacaaggtttcagtctggcgaaaaccggttgggtggcggcaattcctttcctcgcggcggcggtcgggatgtgggttaacggtattgttgtcgatcggctggcgaaaaaaggctatgacctggcgaagacgcgtaaaacggctattgtctgcggtttgatgatgtcggcattaggcacgttgctggtcgtgcaatcttcctcgccagcccaggcggtagcgtttatctcaatggcgctgttctgcgtgcatttcgcgggaacatctgcatgggggctggtgcaggtgatggtgtcagaaacaaaagtggcttccatcgccgggattcaaaactttggcagttttgtttttgcttcctttgctccgatcgtaaccggttgggtcgtggataccacacactcgtttaatctggcgctggttatcgcggcctgtgtgacgttcaccggggcgctgtgttacttctttattgtcaaagatcggattgagtaaccgttactatcaggctctcttgctgtgggcctgtagaat

SEQ ID NO: 197 - DNA, 2702 bp, Escherichia coli
tcctccttcttattttatttattcactattaatcgctttttcttatggctgatagttttatcttgccgaagcgtgcttttttgttattgtctttatgaaatcttcttataaaacaaatatataaatattttatattgatgagttatttgtatttataccatcaataaaatccgttaattagcctgtttataagtgaataaaggaatagccgatgatcgaacactatattcgtgggtttgaggaagaacttcgcgagatccgccatcagatccacgaaaacccggagctgggattacaagaatttaaaaccagtgctttggttgcggaaaagctgcgccagtggggctatgaggttgagcaagggctggcgacaaccggcgtggtagccacgttaaaagtgggcgacggagagaaaagtattggcctgcgggcggatatggatgcgttgccgatttatgaaaatagtggcaagccctgggccagtaaacatcctggtttaatgcacgcctgcgggcatgacgggcataccaccatactgctgggggctgcgcgttattttgccgaaacccgccgttttaacggcacgttacgccttatcttccagcctgcggaagagatgattaacggcggtgagatcatggttaaagaggggctttttgatcgtttcccctgcgatgtcattttcgggatgcacaacatgccgggtttgccggtcggcaagtttttcttccagcctggggcgctgatggcgtcaatggatcagttccatattacggttcgtggttgtggcggacacggtgcgatcccgcacaaagccatcgatccagtgctggttgctgcacatatcaccaccgcattacaaagcattgtgtcgcgcaatgtcgatccgctggaagcggcggtaattaccgtcggcagcattgttgcgggtgaggcggctaacgtcattcctgacagtgctgagatgaaaatcagtgtccgctctcttagccgcgatacccgacaacttcttctgacccgtattcctgctcttgcacaagcccaggctgccagctttggcgctacggctgaggttacgcatgttaacggtacaccggtattagtaaatgacgaggagatggcgcgcttcgcctggcaggtggcgtgcaaaacatttggtgaagatcgggctgagtttggcatcaaacccctgatgggcagtgaagatttctctttcatgctggaagcccaacccaaaggcggtttcctgttattcggtaatggcgatgtcggggaaggttcctgcatggtgcataaccccggttacgactttaacgatgcaagcctggtcccggcaagcagctactggggcgcactggttgaagcctggctgcaataaataaaacaacacacaacaacactttttggcaaggaacatggaatgacggcgatcgtaaatgaaaccgtgagtgtgaagaaaaagcccagcggcaggcgggtgatctttgcctcggcgtttggcaatgcgctcgaattttttgattttggcgtttacaacttttttgtggtctatatcagtacgcttttcttcccacccagtgccgatcataacgtcgcgctgttactggcatttgcaacgtttggtgtgagcttttttatgcgtccgctcggtgggattatcgttggtgcctgggccgatcgcttcgggcgtaaaccggcgatggtgttcactattgctctgatgagcctcggtacgctgatgatcggcatcgcaccgacgtatgaaacggcgggctattggggaaccgcaacgctggtgctggcgcgtctaattcagggtgttgcggcaggtggtgaagtcggggcttcaatgtcgctactggtggagtcagctccggcaaatcgtcgcggcttttacagcagttggtcactggcgacccaagggctggcaacgaccttcggtggggttgttgctttaggtctgagcgcatggctaccgttcgccacaggttcagaaaccgtaatggcagaatggggctggcgtgtgccgttttttattggcgtgttattagcacctatcggttgctggttgcgtctgagcctggaaaatgacgtacctgagccagtgcgcaataaaaaagctgctaccagcgaaagcgcgttttctctgctcctgcaacataaggcgactatcgttaatggcgttttactcgctattggtagcacggtcgcaacctatatctccctcttttattacggcacctgggcggcgaagtatctggcgatgcctcaacattattctcatgcagcgatgttactggcgggggtaattacgtttgtgggtgcgctgttggtggggatgctatgtgattcggttgggcgtaaaaagctgattttaatctcccgtgtgatggtgcttctctgtagctggccgtcattctggctgttggtgaattacccaagccctggcatgttgctgacggtggttttcgtgatggtcagctttaccacgcttggcggtgtgccagtgatgttgttgatctctgaactgttgccgaaacggattcgggcattaggtttcgcgctggtttatagcattggcgtagcaatctttggcggttttgcgcaatatttcgccacgcaatccatcgtgttgctggatagtctgacggctccggcgtggtatctggggggaggcacgttgctgtcgatgctggcgttgt

SEQ ID NO: 198 - DNA, 131 bp, Escherichia coli
gggagatgaagaagcgtggcggcggatcgatagcgcagacggcgagcctgttctggaaatttatcgccagtttcaaccgatgtttgctgctggaatgcaccggatgcgccatatgcagcagtatgccgcga

SEQ ID NO: 199 - DNA, 1021 bp, Escherichia coli
gtaagtgataacaccggggtatttgccccggtttttaatgtcataaataatggattattgaacatgataaaaattgatgaaatagattttttcgctttcgaaggatgttcagagtccgaagttactgaactattaggaaaaaaaccaacaggttataatgattggatgattaatataaaaacaggtgtggagtgggtattttatgatggtcgttattggttagattttcgtaaatccaaagagggtataaggtgtatctcatgcagtattctgtatcacgataaaagtaaagggcgtatcgatgtcttatttagtgaaggtatagctgacagaggtttaaaaaatacgggtggagtgttaatccaaaaacgcccgcaattataataattcctggtaatatttgttttcgtaaaaaggatttactttatgcaacgtcaatataaaaaatacattcttcttttttggggtgtcatggatgttatcgcgatagccacatatctgttctactcgcttggtaatggtcgtatccctttttattccgatatcgttcattcactttctttacttaaggatatcggtgttgaaggcggtttttacgcttatgcagtcgccactgttacgctacaaatagtattattgctctctttattcttttctgcgcaatgttttttaagacaaaaattatttagtttctcttttttggcgattcaggaagttatgcgttttgctaccgtaagctgctcaatctccgtaataccgttgttacttaattattttcattcacagaatctggtcttaaatatttcgttgtttatcttctcagaggtcacaaaagtgacaacgattatctggtgtaaacgacaggggaaagtgtgacagaaatagcaacagatacaggtggatttttatataaatgcctttttaaatgctttcttgtataaatctcttatactgaaagtacatacaagagaaatgcctggataaaaacaacgtgattagaaaaatcttaacaggaaaatgc

SEQ ID NO: 200 - DNA, 6317 bp, Escherichia coli
acaggcgctgagactgatgacaaacacaggattgcctgatgcgctacgcttacctggcctaccagataactgcaatatattgaattttcaagattatgtaggccgaataaggcttcattccgtatccggcataaacaatgtgtactttgccaccaatttgagcgccccttaaggcgctgatgtttttttattcttctcgtgcacattgtgccgcttcagcaatcagccgcacatcaggtcgcgaagttgccgcggcgaccagccagcgacatgcagagttaagtagcgcgattaatcatgggaaattgcctctgcatgggcgagcaggtattgctccgcctcaccggaccagatcccctgatgacgcgccagaatcgccgccagtgcttgatcctgaatctgcgtgagtgacgtcagcggcaggaatttcccggtatacaccagctttttgccgccgccgacggcaggcaattcaagcgtggtttcgcccgcggcattcagcccaagaatatgtgttaccacttttgcggcctgcacttttttctcttcaatcaatttgaccgctgcgcgcatgtcgtcgatattgccgcctgacgtgcccacgtagtgggtaaatgcataatgcacatcgtagaaattaattggcgcgctgaagtgcttatcctgcggtccggcgaagaaattcagacaaccatctgttgccagcaaggaagaggcgagagtcaccagtccttcattaggcacaaagacgaaaatatcatcgaagccgtgaccgccactcagtgccattaacgtatcaaatgctgcatcggcggcattgagataatgaatcagtgtttgcggttctgatggatagtgcttgcgtgcataactcaatttgtcgttgtcggtatcggtaatgacgagcagcgacgggttaaccggtccatgcaacgcataatcaatcgccagcagccccatcgggccggtgccgccgaggatcagcgtgcgcccttgcgggcgaatccccatcgtgtggttataactaccttcctgaagatgatagttggcgttgaacgcgccaatcacgcaggaaagcggttcaaccagcgagccttcaaaataggtttcgccgtcgtatgccagcaggcaatcttgttccatgacctcgttgggaataaccacatgcgtcgcttcgccgcctacccacgggaaggagtagccggggcaatccgggcggtcggggagttgcaggttggcctgaatcacataacgctgacccggctggaatttgtgctgccactttttacccacggccagaatatcgccgcaaaattcgtggccgatgatgatgggattggtcgccacatcgtcgggtacttttttatggttttcacccagattggcctctttccaggaagagaggcacaggctgtcagtgaccaccgttgcgaggatttcatcctcctgcatttcaggaaggtcaaaggtttccagacgcaggtcacgtttgccataaagacgcagagctgttgttttcataaaccacctcatgttgaacgatggccccgacggttgcgccggggcgaagaatcaggacaggaagcccagcgcattaccgataatccctaaaccaaacagggcgaaaatcagccataccgggttaatttttttgttgagcagacgaaccatcagcagcgtcagaccgagcgccagcaaaccagggcaaagttggtcgaggatgttctgcacggttatggtgacggtggcaccatcggcggcaggcgtttgtgaaaccaccaacggtacgttgattgacgtccatttggtcaccagcacgcccatcacaaacagcccgagaatcgacgcgccttcggtgagtttttgcagcaaattaccgcccatatcgctgacgatattcacccctttgcgaaagccgagctgtaggccataccacttcatcgccagacgcaccgcgttgaaaataaagaagaacagcagggggccgagaatgttgcccgaaagtgccagagatgcgccgagcgcggcggtaatcgggcgcagcgttccccagaccagtggatcgccaactcctgccaatggtcccatcagaccgactttgatgccgttaatggtaccgtcatcaatttccgcgccgttggctcgcgcctcttccatggcggcagtgacgccgatgaccgggccacatacggctggcgtggtattgaagaacaccaggtgtcgcctgagcgccgcaacctgatcctcttttaatgggtaaagtcgtttgatggcggggatcatgtcgtagcaaaaacccagcccgtgaatacgttcaaagttaaaggatgcctgttgcaggttggagcgcagaaacatgctcaccagatcgctgcgtgtaatttttctctgttccatgatggctccgttaatcatcaagttggtcaagggcggtgatagtggtggtctggggatgtggttcagctttacgccactgtggatttaactggatgtagagcagggccatgatcacgccgacgccaccgaacgccagcagactgagatcgaggtagccacctgcgaggaaaccgaggaaaaagaaaggcatcaaatatttcacgcccatcatgcgaagcaccatggcgtaaccgaccaccacgataaaaccgccagcaatctgcagtccacgggtcacaaattcgggaatggcgctcagcatattgctcaccatatctgcgctgacgaacagcgagacaatcagtgccggaatagcaacgcgcagtgcctgcacgccaagcgcggagacatgcagaatatcgagagtgcgaaaccgtgcttcttccgctgctttatccgccgcgtgctggaacactacggtgatggtacgggcaaacaccgtcagcacctggcctgccgcagccacaggcaacgcgatggcgattccggtggcgatgctttgctgaccaacgataaccagaatggcggagattatgctggcgagtgcagaatccggagattgcgccgcgccgacgttcatccagccgagagctatcaattccagcgtaccaccgagcataattccggtttttaaatcaccgagaattaaaccaatcaccgtacaggcaattaacggacgatgagtctgaaattcatccagcacgctgcccattccggcaatacaggaaaaaagaaatatagcaatgatttgtagggtacttatttccatgatttgtcaccttttaagtgtcgtcatccctgcctgttaaagcatatgtacacaggcgctattatttaatttgcgattaactgttcgtttattttgtcgataatattgattgagggatctgacgctacgacgcgtaaatccagtatgacgccaagattatttaactcatgaaatgcgttaatatcatcgtcatctaatgaaactgctttggttaactgtttcttaccaggacgccaggccataccgccaatattcagggtacctatttttaccccctggcgaaccattgctaaggcatcctgtgggcgagtgaaaagataaaaaacggtttcgtcctgatattgcgggttgtgataaaccgcgacggctttttcaatattgaccacgttaaccttcattcccggtggtgcagcctgacgcaataatgtccggcgaacttcatcgttataaacttcgtcattgcagataataatgcgttgggcgttagccactttagaccagacggtagtgacctggccgtggatcaggcggtcatcaatgcgggcgagcgtaatgttcatcagaaatcctcctccgctgttgccacctgtctccagacgacgcaggtttgctttgcgatttgcgtcaggtgttcacacagttcatcaatattcatgctgtcctggttatcaaccagttcgagcgccagcggcagagaaaggccgctgattacccgcagacgaggattgcgcatcgcaagcatcgctgccgcattccacgggctgccgcactgtaaatccacggcgattagccactcatcttgattgtgaatgcttactaacttctccagctttgccacaatgtctccggcgttctcgccgggcacaaattcaacggcctcgaccctggcatcgccgtacaccatctgaaccgattccagcatggcgcaggctaatttgccgtgggcgcaaaaaatggcattgaccataaagcctccttagccgcgcgttttgccgcctgcaatgttagtggttactccggtgatatagctggcgcgttcagacagcagataacaaacaaaatcagccacttctgctaatcttccggcgcgcccaataggaatggcgtttttggtatagccttcacgcagctgctcgacggtgatattgcgcgtccacgccagcgcttcttcatattccggcgtgcgcagtcctgttttttccagaatccccggcgcgataccgaccacacggataccgtgcttgcccagctctttcgaccaggagcgcgtgaagctattgagcgcggctttggtcgcggcgtaacagctttggccttctgagccttccagcccactttctgaggaaacattcacaatcacgccatcatgttgtttgaccatctgtcgcgccaccgcctgcgacatcagaaaaacgcctttctggttgatattgaccattttttcgaatgcagcttcgttgagttcatactgcccggcaggcgctttctcatcgacaagcagacgcgggaaattgaccccggcgttgttaaccagaccgtcgatgcgaccaaaacgctggataatttctgctaccgtatgatttatctctttggcgctggaaatatcggtcggccagaactgataacctttatggctttcatactgaccatcgccaccgtgaatatcgaccatctgtacattcgcgccttgtgctaataattcatccacaatcgccagaccaatgccggatgcgccaccggtgacaataatgattttatcctgcaaatttaaccacgtttgcataacagactcctgattttagataatagggacccgccgtaatttttattacggtaaacatcgggaagatttttatttcagtaatagttcagctgtgctgctattcgttaccagacaattaatatattttccacgcagtgcaccaacaattccgctgtatttttcttcgctcatggcaatgccaatggaataccgtgcctgctttaatttattcatttcgatagagagtgttttttcgctcatattcgtttcaaccattgcgccgtgaatatcaaaaaagcgcgagcaaatatcgccagcaacctggcgggcattcaggtcgtcactctcttcaccaccataaaacgcatgccagttagcgccgtcgcgaatggccggtgagccaattcccaccagggcgacatccagattatcccagtaggcagagatggttttaaagtgctgagactgcatgatcccattacgaattaatgggttatccagcagagccggaaaatccgcgagatgcgattcccctttcagcttcgctgccgcgctgtaggttaatgtgtttacgtgatagcggctttcgagtttaccggacgggccgccaataatcggcacgcaaattaactgccgcgattgccccgcctgcggcaagttttcaaccagtgcgctcaccgcgcggccccaggaaaaaccgacaatatcgccaggttccagcaagcgatccagcagttgcgcgccgtgtaaccccatcatcgccagttgagtatcttcatcctcatcatttcctgacaccaccacaacgtctttcaggctaaacttttgcttcacttgctgctccagccagagattttcgttgtagtcatagttgatggcgatggtgacaattccctgatcgcggcctcgtttaagcaagcggctgatggtagtgcgataaatacccagttcgcgcgcaatttgcgcctgcgtcatatcctgttcgtaatagagttgggcaatcttcacaatcaaacggatatcgtcactgttttccattgccgcctcctggttctgcacatttgtgcaaatacgctttctcaccgcttgatctgatataaccccatcatgatggcctttcaaagcgatttttcactctttgcatggggggaaatagcgctttctcttgcacatttgtttctctgcgtagtagtcatcagcacaggtgtgcagcgattcgtaatttgttgattattcttattttgccaggcaaatttgcatcgtacttccggagacacttttgtgataaaaggcgtggcagatcacatttaatttcgacgttgccgcataaccctgtttttccccgctaag

SEQ ID NO: 201 - DNA, 76 bp, Escherichia coli
tgcaggaaggcgacaagcgagtgagtccccgggagcatagataactatgtgaccggggtgaacgagtgcggtcacc

SEQ ID NO: 202 - DNA, 57 bp, Escherichia coli
ttgggctgtgtgttttgccagatgagacattgatgggagatgcccacttaattgagc

SEQ ID NO: 203 - DNA, 157 bp, Escherichia coli
agttctcacttaaacgccgagaacagggtgtcatggctgtcacattgcctgatcgcatattcgttatgctatagtagcgcccccaatttaccagatgcttaaaaagtcgccatgccagcagaatcacacactgtttatcccgcttaccgtttctcga

SEQ ID NO: 204 - DNA, 7324 bp, Escherichia coli
ttaaactcctttactgagcgacatatctgttttaagcctaacagtagtcgccaggccgcgcggggattttttccgggctgcggtcacaacccggaatatctctgatcagtattgaaacggcgtcgccgcaatccagttttgccactggcgctcaaagttggttagcgttaatacgccccgttcacggcacgggcgagtccaggtttggtaatcattagcttcccgacaaacacaaatcatatattgcctggcatcctgattttctggccgaaaacgccaggccaggagtggcccacctggtgtttgcggtgcaataccggcttcgccatcatagatagccctggcaccacgactcccaccaccgttttcgacataacattgtaaagaacgcagtacagccagcgccagttgcgcactttgccgccactggaaagattgtgccaggctgttttcatcgcattgaataccttcccggcgaatatcttcacaaagtgttgccagggtttgcgcggcagtgttgatcccctgtgtatgacacaaaattgcggcatggtggctcatggtattttgtatcgtttctcgcacgtcgtcacgtagcagcccctgattcaggtgctgttgcgcctcattaatcgtactgagaatttgttgcctctcgagaggccggtcctggcttttctgatgagcaatatgtaatgcacagcggcgggcgaaaacttgcccggcattgagcgctgctccacctgggcgcgtgacaccatgtgttccggcattttctccggcagcataacaaccagttagcgatgtacgtgcccaaatatcaacttcaattccgccattaagatgttgattatttagcgtaaacttgagcggtgaggctgtgagatcatgaccgtgcatctgatacaaacgaatagccagaggattcatctgtgttaatctcgccagcggttgtgccagcagggcgtgattttgttgcagatagtcgatgacatcatcatccagctcccgcaggttaaatagtgttccgtccgctgcgggttctggttcccgtagaaaatcgagaaaaacatcgcgccctttttgagtctcttcataaactgcgacatccagcaagctggagccatattccagcattcgttccgcgtgaaacggccactggtaacctttgcgaaatatcgcggaggccagcatacgagtcgtggggtaataagttgccagaaaattatactgacgcccggagtggtcctgcgaatagatgcgcggcatcgcctgcatgtaagtaccggaaagattccacggaaactggctgcgcggtgtaccgataccaaactgactttccgtaagattaaccagagttatccctgcttccagcgccatgcccaacgcactaaaacagttcaccggataaacactgtcacgataaagttcaccaggcccgcccgtggctaaaaccagatgctgacagcgaatcactaccattctccagggattatcccgacaggctttatcgatggcgatcaccccctcgactcgtcgattttctccttcaccactggtcaggatacgaatcgccgttgtgtgatcgcaaagaggaatattaaggcgcattgcctcctgggccagcaccttcaccatcaggcgcgatgttcgaggaccgcagctagtggcacggccaaattcatcgtgatcggtttgataacgcaacgttgcgccaaagagatcttcaggcaaatccagacccagatatttcagtacttcacaggtgttcaccgatccgagcgcctcaacatatgcggtgtcatgatccatcgcaccacctgccgccagggtgttacttaatgtcagaaaatggtcaccatttgcacgcgtattcgcggtgtgaagcgtttgtttatcagaaccagaacaggcggaagttccccagaaggctttgctggaggctaccattacatcgacattttgccgtttcagctcgacggcagctcgccatcctgccgcgccactgcccagaaccagcgtgttgcagcggtactcaggtaaaatggtaccgttaaggtcgatactaccgctgacttgagccagcggtgcgtaatggggcattttcacgtcagtcagggaatcgataatagattcagagacattatgcgtcatggtaggtgcccgtagtctggttatgttgggaaacgctgatcgtttcagcgtcggcaagatcatcaagatcacgatcgcgtgtttctggagcaaagaaagtcgcaataatcgtaccaacggtcagcagactaaggtaaatagcgattggcatccaggcagcaataccactgggatcgttagtgtggatcacccaggaaatgattgcagaaccaaccagtggcgcgatccctccggcaataacggcagaaacttcccttgccagtgcgacgccaatataacgatggcgagcaccaaagagttcaggcagaaaagcaccttgtgcaccaaacataccccaggctccaatccctaaggccagagaaagagagacaatagtgacaggaacattaccgtggctgaaagaccaccacaccggaaaggtaatcaacaactgaaaaatcgccagactacgatagacaagaaccctgccgaagcgatcggtcagccaaccggcaataggcaccataattgcaccgactactaccgcagacatcaggcatagcgtaccaactgatttgtccagcccaaccacaccaacgatataactgatcgctaaagcctgataaatcgacgagccgccgttttctgccagacgtaagccaatcccgacgaagacattacggcgtgatgttttcagcaaatttcgtaagggtgattctgtaacttgttgacgagcttcgagttttgcgaatgatggcgattctttaagatgcagtcgaatataaatagccaccgcgataatcaccacgctggagaggaagggcaagcgccaccaccaggtttcggcaagatttgtcacattatgcagcaggatgaagtaaacggcagatgccataaacgtaccaatctggattccgaggaacggcagcgcggcgtaataaccccgtttgccgtcaggagcatattcggtcatcagtacggcggctcccgcctgttcagccccagcaccaagcccttgcagcaggcgtaatgcaataagcataattggcgcccagattcccgctgtttcgtaagtgggtaataccccgatcaacgtgctggcgattcccattaacaacaccgttgctaacaggacgaacttacggcccaaacgatcacctaatgagccgaagagaattccgcctacaggtctgacggcaaatccgagaaagtaggtgccaaaactggcgatcagcgccattcccggttcctgattaggaaaaaagagtggaccaaaaataatggcggatgccaggctgtaaagtgcgaaatcgtagtattccagtgcgctgccgagagagcaggtccacgccgcgcgacgcagatctgccgatgaaacattcgctttctctgctggttgtgaaggttgcatgatgtgtctcctttcagacggataaaagaaatccgcctaaaatcaatgggattcttgcgttattattaaaatccaaaatgaaatgctaagttatcgagcactaaagtgcggttgacgcttctcagtaaatgcctgactgccttcatgagcatcttcagtcgtggcggaaaaagcgccagccagtgcttcaagcgtcgaggccacagcaataccttctccggcatcaataacctgcttggcgatctgcactgcaacgggagcacgctgggcgatacgttgtgccagttgcagtccggcgtcgtgtaacgtctccctggcgacaacgcgattcaccagcccgcaggacagtgcccgctgtgcatccagtggttcaccggtaaataccagttctttcaccagtgagcgcccaagcagtgccgtcagccgctgcgttcctgaccagccaggcactgtcgccagcccggtttctggtagtgccatttgtgcttcggcgctacaaatacggatatcggcggtagcagccagttccagaccaccgccataagccaggccgtgcaacagggcgattacgggctgtggcagttgtgccagagcatcaaatgcctgatgaccgcggcggatccagttgcgccacatatcgagtgcagaaagagaggtccagcgatgaatatccgcgccgacacaaaacgctttttcactggcactggtcagcagtactacgcggatctccgaatcagtttccaacgtgtggcaatgcgccagcagttgttcgagcatctctggggttaatgcgttgagtttcgccgggcgattaatcaccaaagtggcaatgaaaccgttgcgctggaggtcaatggtgccgttattcatggtgacgtccttgttgaaaatagtggggattcattagtttgagatcgtctgccagacggagtggggcatcgctttgggcgagaatgtcgcgttcaggatcaatacctggggcaatttccgtgaccagtagtccgtctggggttaattccagcacgcagcgttcagtgatgtactgcacttgttgcccgagtcttattgcgcgtttgccggagaacgtcacgtgggcgacgtcctgtaccagttttttggctttgccttctttaatgatacgcagctgaccttcttccagttgcagttgggcaccggcattgaaaaagccagagaaaataatgcgcttcgcatgtgaggtgatatcaataaatccaccgcatccggcagtgacatgtggacgagcggggagatgtgagacgttcactgagccatctgcgccgatttgtaaaaacgacatcagagtgagatcaaagccaccgccctggaaataggtgaactgctggggagagggcaaaaatgcttctgcattagaggcacaaccgaactgaaattccagcagtggaactccgccaatcgcgccctgttccagcagccaggtgacgtcaccgtggcgaccttgttccagtagaatgcgtggtacgttggcagaaataccaaagccaatatttaccgcatctccactttgtagttcttgcgcgactcgctgggcaataactcgcgccgggccatgttccatataacgaaaggctgatagcggacgactgatttcgccggaaatggcaggttcatattgcgtttgtgtcgtttgtgtttgttccggcgcaatcacgatgtaatccaccagtacacccggaatacgcacctcttttggtttcagacttccggcggcaacctgtcgttttacttgcgcaattatgatgccaccattattgcgaacggcagtagcctgttccagtggccccagataagccccttcatgttcataagtcaggttgccgcgttcatcggcagtggtagcgcgaatgatcgccacctgcggcacgatactggggaaaaacagccagtcgtcgttagcaaatcgaacacgttcaaccagagattgttgcgccgctttttcattcattgcaccgccctgcaacaggggatccacataggtatccatgcctgtttgtgtcagcacgccaggacgatgagccgccgcttcccggtgcatatcaaataagatcccggaaggcagattccaggcggggatcgcgttgtcattgatcatttgccagattaacggaggtgccattgatgatggaccggaggggtaggagccagcgatcacttttgccagtaagcccggttgcgccagatgatcgatgccttttacgccatacatatcaccagcggcgatagggtggatggaggtgatgttttgcggatgtccggcacgttgaaagcgttcacctattgctgccagcacagcatccggacaccccattccactggaggaggagacggtgacaactgcgccatcaacaatcaaatctgcagcttccggtgcagtgatcgtgcgtacagagcacataataatttccttgtttcgatataaaaataattaaaaatatgcatttaaaacaatatgataattttcataaattaattggaacgatctaatttatgcgtaatttgtacgattagggtgtaaaaaacacaacaagggaagtgcgaatctgtgatcgaaacgacgatctcctgcgatcccttgcgttaacggatcgcatgagtaaaaggagattatgataaagtaattgccttgatcttatggggggttggagcaggcatggcgaagtcggatacaggaagaaagcgggtaacattaaccgatgttgcgcgtgcggctggcgtttcgaaatcgaccgtatcgctggttctcaacgacagttcacttatcaaaaaagagactcaacaaaaagtccagcaagccattgaacaattaggctatgtctataaccgttttgctgccaatctgcgttcgcaaaaatcgctaactatcggcgtagtcattgacgatttgataaatcctttcttcgctgaatttactatgggtcttgagatgacgctggcggagcacggttttatcaccgtgatgtccaatacctcccagcgtagtgaccggcaaaaacaggtgcttgataccttgctggaacaccacgtcgcgggcattgtcctctgtccagtgaacagtacctcagaagccgatttacagcgttatgccaacagttccacacccttattaatcacgatgcgtcctctggattggcaacaattgcccgtcgattacgttggcgtggacagccacgcaggtgtacgggaagcgacggaatatctcattcaacaagggcacagagatatcgtgtttattggtggtcttacgcaccatatgcgttatcagggataccttgaggcgatgaatcaccatggtttacagccgtggagtactgatgctttttcgctgcgtgctgaaccgactcaggccaacggctaccagttgatgcaacagctgttggatatgccttcgccacccacagcggtgatttgttataacgatttaatggcttttggcgcggagtcggcactaggcgaaagaggattatttgccggggaagatatttcgttgattggtaatgatggcgtggcggcttgtgcttacagtaacccgccgttaaccacaattgcggtagaaccattggctctggggaaacaggcggcgcagcaaattttacggcgtattgcgcaaccagacgcaccgctcagccattacatctatcgcccgaccctgcaaattcgcgcttccaccggaaagcgggggcgttaaatgctgtagcgagaaactgtttctcgctatactctcttgtcccccattcaacagca

SEQ ID NO: 205 - DNA, 709 bp, Escherichia coli
cactttggggccagctaaacactggtcccaaaattattctgccgggctttcaatccctttttttagccactctttaaggctcagaaccgagttatcttcgtcttcgtggaatatgatattgtcgatctgccaacagccatcatcagcggaacgcgccattagcgcttcgtcctgccaggcctttttatcatcaacgctaaaatgaaaatggagggtgacagtgacgttgttatcaccaggtttaaacgatgacggtagcgtcacgccatcaaatttctcatagtaactatccgaaggataagacgtgaaaataatcccgtcaccaaaagtaggtttggccgtgggatcaatggcgtagtcgcgtttatttctgtcatacgcgccaacaataagttgataaagcgagggggtgaggtaattctgaaaaaatgccagctggtctttttcactcttaaagccggtatcagaaaaaacataggttgaataaaacttatctgcgacaccgtcaggtgtctgcaccgggcaagcccccgtcgcggcaggcgttatacctgcgattagcagaaaaaagaaaacaaattttatctttgtcatggctgaaaatccgatatcatcttgccgtttataaacccatccctggatgtggaatagcatactccggtcatatctgtttagcgaggttttgcactggtgggcagaacctgaaaaa

SEQ ID NO: 206 - DNA, 1583 bp, Escherichia coli
attcgtctccagggagggacaatgtcttattcagaaatcgccgcgtgtctggcatacgcggtttccgtctggctggctgccagaaacaatgtgcatacatggtggatcggcataattggcagcatattgtacggctgggttttttggtccgtgcaactctatgccgacgttacgctccagttattcttcatcgcgaccagcatcactggctggatccactggctgaaaggtcagggtggcgacatcttgccggtgcgccgaacgcaagccagtcactttttccttttgttgctctgtgctgtcgtcgtggcaggcggttacggctttttactccacacctttaccaatgcctgggcaccctggctggattcgttgattttgacctttagcgttctggcacaattcatgttgatgggaagacgtatcgaaaactggttcgtctggttagcggtgaataccctggcagtgccactgtatatgacgcgcggtttaaacctgaccgctggcttatatttcctgttctggattaacgcctggcatggtttgtatcaatggcgcaaagagttgcaaacatcatgaagccttttgcaacgggcctggtggttggtaaattcgcgcctttgcattgtggtcatgaaaagttgatcaataccgcactggcgcaatgtgaagaactgttcatcatcagttattccgtgccggaaatgcctgactgtgaacctgaaaagcgcctgacgtggctgcaagtgcgcttcccgcaagcgacgattttggtactgacgccagagcttgttgcgcgttataacttacctgccataccgcataacgatgccgatgccgacatccaccgtcattatgtggcgacgctgtgcctgcagatattacgctgtcgtccacatgctgtatttactgcagaagactatggcgatggctttgctaacgtgctggcgcggcgttttgcccaacccgttgaacacgttcgaatggcgcgcccagttggcgatgaagcgccttcgggaacgcttattcgttccgatgttcaccgctatcgctacatgttggcgaatgatgtttattacagtttcgttcgccgtatctgtctgcttggtggcgaatctaccggtaaaagcacgctttcaaaagcgctggcggatgggcttgatacggtgtatgtcgctgaatttggccgcgactattgggaagaaaaaaacggaatcttaaccgcggatgatttgttgcatatcgcctgcgaacaggtacgccgggaacaacaagcagaagctaatcactatcttatatgtgacacgtcgccactcacgaccttgttctatgcccttgatcaatatggtcatgctccgcaagaacttcatcaactggcggagcgggaatactctctggtggtgctttgcggcgcagaatttcccttcgtgcaggatggcacccggcaaggagaggtatttcgcgcacggcaacaggtgtggtatgaacaggaattgtcgcgcaggaacattccttatctttcggtttcggggccactgcaagagcgagtggagcaaattcttcgccaacttcccgactgactt

SEQ ID NO: 207 - DNA, 13714 bp, Escherichia coli
tttaatcaacaggcggatctctccgcctgttcctgactccagccatcccctactattctgtcccttttttcgcccacttttacatcatctcttttctataagtttttgaaaattagtgtttttaactgttggtacggattgtgcagtaatgcggctgtctatgaccatcaggagaaaaacatggagaacatgacctcgcccggcacgctgcttagtggagataacgcgacctggcttgaagagtactaccagacctggttgcgtacgccggaacaactcccggaagactggcggcgtttttttctttcacctgaactgactgtccaaagcgtatccggtgataacaacgtcagcggtgcgacgttaaaaaaacaggctgcggtaatacaactgatcaatgcctggcgcacgcaggggcatctgcgcgcaaagcttgatccacttggtttgaatcccccggctgacgttccctccctccagcctggtttttggggattaagcgaagaagacttgttgcaggaatttagcgtcacctttggcgcacacaccacgcaaatgccacttaagcaactgcttaacctgctggagcaagcctgggcgggtagccaggcttatgaacttgctcatctggaaaatcgtgaagaaatcaactggttgttatcacggattgagagcagcaatgcgccacaagcagatgtacaaacctgtattgctcgttttgaaaaactgatggcggcagagacgttagagcgttatctgcatacccgttatgttgggcagaaacggttttctctggaagggggcgaaagtgcaatcccggcgctcgatacgctgacaaaacgcctgcgtgcgcaaggtgtggaggaaatggtcattggcatggcgcaccggggaagacttaatgttctggttaatctgttgaataaagacccggcacagctttttgctgagtttgaaggcaagcagacgatcggcagtggttcaggcgatgtgaaataccacatggggtattccagcaatctggaaacacctgccggttcgctgcatgtggcgctggcgtataacccctcacatctggagatcgtgaatccggtggtgctgggccaggtgcgagccaggcaggaacgccgtggtgaggatggtcaggcaaaagtggtgggcgtacttattcatggggattccgcgttgggcggcctcggcgtcaaccaaaccacgtttaacttatcgcagactcagggctacggcactggcggtacgctacatctggtgattaacaatcagattggcttcaccacttcccgcttgcaggatatgcgttcttcacggtactgcaccgatattgccaaaatggtagcggccccaattatccacgttaatggcgatgacgttgacgctgtttgccaggtaatggaactggcgtgcgaatggcgagacaccttccggcgcgacatcatcatcgatatttgctgcttccgtaagcacggacacaacgaaagcgatgagccacgtcttacccagccacaaatgtatcaggcagtggatgctcaccctggtacgctcgcccgttatggtgaatctcttgcccgccgcggcctgttaactcaggcgcaacaagatgagatgacggcacgctatcgcgactggctggatagctgccagaaacgtgaaccgcagcctctcaaacctgcaattcactcttttagcgctaactggtatgggttgaccaaccctcactggagcgccccggtatctacggcattgcctcggcaaaagctggcagcgtatggtgaaatcatttctacgctgccacccgatgtggtcgcacatcctaccattaaacggcaactggcgttacgccaggatatggccgcaggtactcagccaatagactggggaatggctgaaatgctggcctatgcatcgcttgtggatgcgggtgttggtgtgcgtctttctggtgaagactcagggcgtggcacgttcagtcatcgccatgcagtggtacatcatcaaactgaagcccgtcgttatctgccgttacagcatatccgcgctggtcaggcatctttcgatgtttatgattcggtgcttaatgaagaagcgctcttagcctttgaatatggctattcaacgtctgcgcctcagcaactggttatttgggaagcacagtttggtgactttgccaacggcgctcaggttgctattgaccagtttatctcgtctggcgaaaccaagtgggatcgctatagcggtttaaccattcttctgccgcatggctatgacggacaagggccggagcactcttctgcgcgtcctgagcgctggctgcaactgtgcgcagaaaacaacatgcaggtggtgatgcccagtgagtcagcacaaatgttccatttgttgcgcggtcaggcattacgcccaatgcgcaaaccgttagtgataatgatgagtaagcgtttacttcggtttaaaggcgctatgagcgagctttgtgaattcactgatggcgcttataaaccggtaatcaccgatccgcaattgcatcagtcccagaaagttaagcgcgttattttgtgtagcggccaggtctattacgacgtactggaagcccgtaagcagcgtgagcatgaagacgaagtggcgattgttcgcctggagcaactctacccgttcccggtcgcagaactgaatgatgttctggcgagttggccgaactgctgcgaatggatttggttgcaggaagagccagaaaaccagggcgcgtggcggcagattcgtcatgagctggcggcactgaaaattaacactccttactggcagtatgcaggccgcccggcagcggcagctccggcgacagggtatgggcgtgtacataaacaacaaatcgacgaatttcttgctgctgcgtttgcagatattcagccatgaaaggcgcacaaaaataataaggagaacattttatgatcgaaattactgtccctgtattaccggaatctgtcacggaaggcacgctgacaacctggtgtaaacaagaaggcgagcacgtaaaacgcgatgatgtgattgccgagctggaaaccgataaagtcattctggaaataccggccccgcacgatggcgtgttaagcaatattatcgtcagcgaaggtagcacggtcacgtccgcgcaactgttggcgcatcttaagccgcaagctgtcatagaagaaaccgtcacaccagtcaccgaaaccctggcgatgccttccgcacggctggaggcacagcgtagtggtgtcgaacttgctgacgttgcggggagcgggagaaatggacgtatcctgaaagaggatgtacagcgcgttactcctgcaccagtcattcagcctgaacgggtggcggagatcgctgccagctaaacccttgacaccgggtgctcgtcaggaacgtcgtgagccgatgtcgcwgcttacgtcagcggattgctgagcgtctgctggcttcccaacaaaataacgccattcttaccacattcaacgaagtaaacatgcagagcgtgatggatttacgcgcccgctggaaagatcgttttgccgagaagcacggcgtgaagctgggctttatgtccttctttgttaaggccgttacccgggcgcaggagcgcttccctgtagtgaatgccagcgttgatggcaacgagattatctggcgtgattattgcgatatcggcattgcagtgagcagcaaccgcggcctggtagtgcctgtgttacgcaatgcgcaatcactctctttggtggaaattgaacggcaaattgccgaatacgccacacaggcacgcaatggcaaattgccgctggaggcgttacagggcggcacgttctctatcaccaacggcggtacttttggttcgatgatgtcaacgccaatcattaacccgccgcagtcggccattcttgggatgcatgccatcacgccgcgcccggtcgcagaaaacggccaggttgttattcgtcccatgatgtaccttgctctcagctatgaccatcgcattatcgatggtcaggaagccgtgcagacattggtggcaatacgtgagctactggaatcaccggaacaactgttgctggatctttaaggagggcgccgatgagtacaatttttgatgtggcagttatggggggggggccaggtggttacgtagcggcactgcgggctgcgcagaatgggctttccgtagtatgtattgatgatggtgttaatgcacagggcgaaccttcgccgggcggtacgtgtctcaatgtcggctgtattccgtcaaaatcgttgctgcaatcttccgaactgtacgcgcaagtgcagcatgaggcgagcattcatggcgttaatgttgacggcgtatctttcaatgcagctgcgatgattcaacgtaaagacgccatagtaagccgcctgacaatgggcatcggcttgctgtttaagaaaaataaagtgaagtacctgtgcggcctcgcaacgttagaacatgctcgggatgagatttggcaattacgtgtaaacgatcaacaaatccgcgcccgtaatgtggtgattgcaacaggttctcagccgcgtcaactgcctggcgttaccattgataatcagcaaattctcgataatcgcggcgccctggcgttaaccgctgtgccgccgcgtctcggtgtgatcggcgctggcgtgattggccttgaactggggtctgtgtggaatcgggtcggttcagacgtcacgttgctggagatggcgccaacgttcttgcctgcactggaagctcgcctgtcgaacgaagtccgtaaagcaatgattgccagtgggatgaaaatgcaactggcagtagagattgaggctattgaacaacgggatgacggtgtgcatgtgcgctggcggcagggtgagaagcgagaagaaagccgcttcgataaattaattcttgccattggacgtgtaccgcgactttctggtgtcgatctcgtgcaactcggtcttgaagccgacaaccgtggcggtattgccgtcgataacttatgccgtaccgggaaagccgggctgtgggcaattggtgatgtcgtgcgagggccgatgctggcgcataaagcgatggctgaaggtgtggtggttgcggatcaaattgccggactggcggtagagccgattaattttgcgctgatcccttcggtgatttacacccaaccggaagttgcgtgggtaggggaaaacgaggcctcactgaaagccgctggcagagtctttaacaaaggaaattctctgtttgccggtaacggtcgcgccttagcattaggccaggaaggtgggcgttgcacgttatacagcgataaacacactgaccgcgtacttggcggagcgattgttggcccgcaggcatccgagctgatcaatgaaattgcgctggcgatgacttttagcgcctctggcgaggatattgcctgtgcgatccatgcgcatccgacattaagcgaagtcatccacgaagcagcaatggccttgaataataaagcattacacggataacacataccactgagggaatatatgaatttacatgagtatcaggccaaatcgttactggctggcatggggatgccgtgtccaaaagagatagccatccaacagatttcgcaactggcagatgcctggcaacatattgcttgcccgagtaaaggcgcggtacttaaagcgcaggtacatgctggtgggcgcggtaaagctggcggcgtaaaagtgcttaagcagctgccggaagcacaggcttttgtacagcaaatgttgggatcgcaactggtgacttatcagaccgggccagaagggcagtatgtcagcagtattttgctgtgcgaaaacatctatccggtacgccaggaactctattttggcatggtggtggatcgtgaaagccagcgggtcacgtttattgtcagcccggaaggtggcgtggaaattgaaaaagtcgcccatgagacaccggagaaaatcagcagtgtcagcattgatccactgacaggcgtgcagccttgccatatccgcgaaatgtttgctgttctgcaactggaacacgggctatttgctgcctttagtcgcctggttaatcaggcgtggaaagcctttaacgaactggatttcgccctgctggaaattaaccctctggtgttgcgggaaacgggcgaatttatgtgtgcagacgcgaaagtatcgctggatgataacgcgctgtatcgtcacccggaactccaggtgctacgtgatgaaacccaggaagatccacgcgaaagccaggcagcgaagcttgatcttaattatgtctcgctggacggaaatatcggctgcatggtcaatggtgcagggctggctatggcaaccatggacatcatcaagctatacggtgaacaacccgcaaacttcctggatgttggcggtggcgcaacccaggagcgcgtcagtgaagcctttcggctgattgtttccgacagcaaagtgaaagccattctggttaatatttttggtgggattgtccgttgcgacatgatcgccagagccattattcatgctctgaatgaggcccgtatcaccctgcctgtcgtggtgcgtctctccggtaataacgctgccgaagggcagcggttactggcagaaagtggcctgacggtggaagccgtcaattctctggatgatgccgctaaacgcatcattgcgttactgaattaacaggaggttaagatgagcgttttgatcaacaaacacacgcgggtactggtgcagggcattaccggcaaaaacggcacatttcatacagagcaggctattgcgtatggcacgcagattgtgggtggagtgacgccaggtaagggcgggcaacggcatctggatcgcccggtttttgattcaatgaaagaagcgatgcgacaaactgaggctgatgccagcgtgatttatgtgcctgcaccgtttgtgctggattctgttgttgaggctattgaagctggcgtcaaattggttgtggtgatcactgaaggtgtaccgacactggatatggtgaaagttcgtcggctgcttgactgccacccggatgtgcggctgattgggccaaactgcccaggagttatcacgccgggcgagtgcaaaatcgggattatgcctggtgaaatccaccgcccagggcgtattgggattgtttcccgctccggtacattaacctacgaagctgtagcgcaaaccacggcgctgggacttgggcaatccacctgtattggtattggcggcgatccggttccggggactaactttattgatgcgctgcgtttattcgaaaatgatccgcaaacagacgcggtaattatgatcggtgaaattggtggtaatgcggaagaacgggccgcggaatttattcgccatgaaatgaataaaccggtcgtaggttatattgccggtgtcactgcaccaaaaggaaaacgcatgggacacgctggagccattatttctggcggtagcggcagtgcggaggataaattccgggcgttcgataaagcaggcatggcatggacacgaaatccagcattacttggcgaaacgttatggaatgttattaagtaatccataaatgaatatcaagggagcatatcgctccctttttttatctgtgtggtaagagaatcaccttttatttactgtgcggaaaaccgcgcacaaaataaaaagaataaataataaaatcattaaataacaaagcgttattaaaaaattaaagatggcatagctcctgcaatagccaggcaggttttttatttttcacaatgaggtgaatatgtcatcaatatcccatggcgcaccacaaaagcgtcgaattatccctaatcccggcctgtggttggcgatcattgccggaattattattacccttctgccactgggcgataccttgcccgtcgctggacaaaatatgatcgccattctggtgtttgccattattgtctggatcagcgaagcgatggattacaccgccagtgcaattgttatttccgcactgattatctttatggttggttttgccccggatatgaatcacccggacacgatccttggcaccgcgaaagcgctgaaaatgactctgtcgggtttttctaattctgctctggcgctggtggcagcagcaatgtttatcgcggcggcaatgaccattaccgggctggataaacgcattgcgctgtttactatgtcgaaaataggtgccagcagccgcagcattattatcggtgccattgtggtgaccatcgtcctgagcctggtcgtacccagtgccactgcccgtacggcttgcgtggtgccgattatgatgggggtcattgcggcatttaaggtggataaacattcacgtttagcggcgtcaatgatgattgttatcgcccaggcgaccagtatctggaacgttggtattcaaacttcggcggcgcaaaacctgctttctatcggttttatcaataaaactttcggcgccgggcattctgtcagctggcttgactggctgttagcgggcgcgccctggagcctcaccatgtcggtgatcctctatttcctcgcacgtaaattgttgccgccagaaacggaagctgttgaaggggggagcgaggccattaaaaaagcactcgcagaattagggccaaccaccggtaaagaaaaacgcttgatcggtatttcgctgttgttactgctcttttggtctactggcggaaaattacacagtattgataccacctctgtcacccttgccggactggcgattatgttgctgccaggcatcggtgtaatgagctggaaagaggtcgaaaaacgtgtgcagtggggcacgttgctgatgtttggtattggtatcagcctggggtccacgctgcttgatacgcaggcagcttcatggatggcgaactatgtggtgaaaggttttggtctcgatggcttgccatcattagccatcttcgcgattctcgccgctttcttgataattattcacctggggtttgccagtgccactgcgctaactgccgcattgctgcccatcctgattagcctgttaagcagtctgccgccagaactcggcgttaacccggtcggcatgaccattctgctcgccttcagtgtcagttttggcttcatcctgccgattaacgcgccacaaaatatggtgtgtatgggtacggataccttcacgccacgccagtttacccgtgtgggactgtacctgacggtaatcggctacctgttgttgctactgtttgccgctacctggtggaaaattttaggtctaatgtgaggaaaccaacgatgtcattacaaattgctgttgaaaaagtgcgttggttagctgccgggctgctggaacttaatggctgtgatgccgatatcgctcaggatgtggcggaacatatgattgaagcggaacgttatggctttgccagccacggcgtcacgctgctaccgaaatatctggaaaatatcgctcgtggcgatgtaaccgcgaatgcccgcccggaatgcttaacaagtgaaggtaatttacaacgttttcatgcccacaatggctttggtcaacacgccggaaaagtggcggtaaatgctgccatcgaacaagcaaaacgccgtggtttttgcctgttaacgttgtgccatgcgcatcatttagggcgtatggggcattacgggcaaatggttgctgatcaaggcctggcgatgctggccatgagtaacgttaccgggcgtccggcgctggtcgcgccctggggcggtgcggaaccgcgtatgaccactaaccctttctgctttgcctggccgttcagtgatgggcgtccgccgattctggttgattttgccaccagtagcatggcgctaaataaagcacgggtaatgtcgtccaccgggaagcaggccgcgccgggacaattgattgatgcacaggggaatccaagcaatgatcctggggtgttattcagcaatcctccaggggcgttactgccatttggtgagcataaaggatttggcctggcactgatgattgaaatgatggcggggatcttatctggtggtgacacgatcgccgaagatcatcagacggatggatctgcgcataatcatctttttgcgttgattatcgatcctgatcaattcaccgatctggcaggggagaaagggcagttctttgcggattatctgttagctacgcagcctcaacctggcggcaatccggtgatttaccccggtatgccagaagctgccaaccgggaacgcaatgcgaagatgattacgatcccggtatcattctggtcctgggtagttgaacattacgcccgcaaaggtatcgatttggggttacatcctcaggaatcagcattagctggatgattctggtcgataaacttgcggttgaatctgatgtttgttgagtttgtcatataaagtcttgcgcggcagctgtaatagccgcgctgtcaaactgacctggccttccgtttgtcgcagcatatcttcgattaactttttctcgaaagcatcaatgcaggcggtaaggccactctcttcttgctgagtcattggcactggctggtggtgggtcagtaaaccgagaacaaaacgctctgcattgtgtttaagttcacgtacattgccaggccaactttgtgattgcaaccaggccagtaacatgggagaaatatcaggcagaggacgattatatttttgtgccgcctgactggcgaaccagtaaaacagttcagggatatcttctcgtcgctggcgtagaggtggaatattcaggctaaccacattcagacgataatagagatcgagacgaaacagatgttcttcgctgcgacgcagtaaatcttccttggtcgctgcaataacacggcaattcaccggaattaattgattggcacctaatcgttcaatggttctttcctgcaatacacgtagcagttttacctgcattcctgatggcattccctctatttcatcgagaaataacgtaccaccatttgcatgttcaatttttccaatacgctttttaaccgcaccggtaaatgcgcccgcctcatgaccaaatatttcgctttcaaacaacgtttctggtaagcctgcacagtttaaggcaacaaactgcccctgacggcgggtactccagtgatgcagcattctggcgacgacttctttaccacaacctgtttcaccataaataaggacatcggcaccggtatctgcgacattaaggatcattttacgcagttgttgcatctgcggactacgaccaatcagcaccgggccattttcctgttgcagattcgccagtaattgctgattttctaaaaccaatcgccgtttttctaccgctctggcaataatactcaataatttatctgagctacttggtttctcaatgaaatcgaatgcaccattacgcatggcatccaccgccatttccacgtcaccgtgtccggtaattaaaataaccggaattttgctatccatttcgttgatgtaactgaggagctctagtcctgatattccaggtaacctgacatcggtcagtataataatgttggcctgactttgaataaggggaatactgtgttctgcatcgcaacaggaaataacacgataaccagccagcgtgagcgtttgttcacaggcaaaacgtacatcgtcactatcctcaatataaactatagtaatttcactggatttattattcatgttcttctccccattcaggccaggttaatgtcattactgcgccgccttcaggatgattactggcgtggagtgcgccgttcgaatttcggacaatttcgctgactattgccagtcccaaccccattcctctacgtttagtggtaaaaaatggttcaaatatgcgatcgacaacttcaggtgcaaaaccgccaccgctgtctttaatggtaataataactttgttatttgcctggcgaatggcgatatccagtcgtttgtaagagctaccttccatagaatctaaggcgttgctaattaaattactgaatatctgttcaagaccgagctcatcgcaattgacaaataacggcatggatggggcttttattcgtcgctcaatgttatttttctccatgctgtgattaagtaacgccacggcgctatacatcactttgatgacatcggcagaacctttaggtacgcgatggcgcgaggcaaatgctttaagttcggaaatgagctgcgtcatccgctcaatcactgaaataatatgtttcagattctgttcaacctgcggatacatctctttttttagcatagtacgcgcgttatcagtaagtgcgtgaatggcggctaacggttgattttgttcatgggcaatttcggttgccatctgtccaagcgccgccagtttgctggactctgccagttcactacgcgtaatttgtaatacttgttcagcttgactgcgctcttttatctcctgtattaatttttgattgatcaattccagggcagatgtacgctctttaacctgtttttctaatgtttcattcgcaagtgttaataattgttgtgcatgagatcgcattctccagtatttaataaataacaaaaacagcaggtaaataattagtgtaatgactaacgaaatagcccatgaccagtacaggttatctaaggggaccataattgtcattttccagttaaattctggaatggctatttgttgcgtataatattgcgggaataaacagagttgttcttttttatctttcaggaaagtaaaattgctcacggtataacagggataataatccgccggtaaaagattgtcgagactatattggcgggtagattgtagtttttgttttgcctgaacaggtaacggttgcagtgttcgcattcgccatggcgattttgaacttaaaaatataatcccatgttcatcattcacgataatattttcaggaccttcggcccatgctttttcaatttcattaagacttatttttactactacaacaccgacaatttttcctttatcttttatacttgtagagaggaagaatcccggtgtattcgtagtgctaccaataccgtaaaagcgtccatttaagccagacatggcgtgtttataataggggcgatagctataattttgccctacatagctgccggggtcctgccagttgctagaagcgatggccttaccttgggtatccagaataaatattgctgcggttttgagttgagtattgaaatgtgcaattcgttgattgagttcgctggacgtcatatcgtcaggcgtaattaccgcctgacggatgatatggtctgttgagagcatatagggtaaaacataaaattgctcgatggtggaatataatgtggacttatacatttcaagccgcattttatcggtactggacaaggtattaaaacgcaagtgcaaaaaagcgattgaaaccgcgagcatgataagaaaaagtgaaatgcttgtaatgtgaaatcgccatttgttcttaaatatataattccacgatattttcattcatcatccattgaatgcatttatatttatcatcagtatattccctgaacaatgtttgcgagaaccaaaagagtgccattgtgtgaatgtgtaagcagaataaccgtggcaatgtgtggtttatcgcacaggtattcc

SEQ ID NO: 208 - DNA, 2120 bp, Escherichia coli
  misc_feature (1979)..(1979): Unsure
tctgcatggttggcgggcgagcccgccaacccgacttacactggcgttaaccagtatccttcacaacagctcagccacgcgtgggcagagtgggaaaggtaaacgccctcacgccaaatcattcctaatttccagcttagttcgctttccagcggtagccattttaaggtgtttttatctaatcgctggcaaatgggttccggcaatatggctattccgacaccggcctgaaccatcgcggcgagaaaatcccattgcccgctgcgaactgcaattctcggcttaacgccatgttcatcgaataacttcatcaattgcttacttaaggcaaaatcttcgttatagataagtagaggatgttccgccaatgtctccggtgagacggcatcacattcaagccatttacctgaatgtggcgtcagtacacatagtggatgactaaacagcgataacgttgtcaggccgctttcttctactggcagggctgtcagtgccatatccagttcaccgttcatcaccgcttgttgtaccgtcagaccaccaaactccgaaattttcaattctacgccggggtaacgctggcgaaaaaggccaatcggcccggccatcaacatcccaaccatcggcgggattcccagccgcaaaacgccggttttaagctgattgatatcgctaagctcagcttccagttgccgaaactcagccagtaaagccagcccgcgctcaaatacgacgcgaccagtatcagtgagaagcagccgacgaccatcgcggatcaacaatatacagttcagctcatcttcgagattcttcagcatcttgctgatagttggttgggtgacaaacaacttctccgctgcgcgggtgaagctttgctggcgcacgacttcgacaaaataacgcagcgttctgatatccataactattccctttgactatacctgcaatgattttaattcatttcagtcaggggcgagcgctctctatacttaccattctgttttattttcaggatatcctctcatgcccgtggcgcttcgccgcattacccctgccgtagtgcaatctatccaggtattttttcaggttgtgctgtatgcaggtttatttatttttgcgcagtatctcgtctcctggctgcatttgccgctgcctgccaacctggtggggatgatcctgatgctggcgctgattgtttgtcgcattcttcctctgcaatgggttcgagccggggcgcgttggctattggccgaaatgttgctgttttttgtccctgccgtggtggctgtggtgaactatgcacaactattactggtggatggctggcgtatttttgctgtgatcgcgctgagtacggtgatggtgctgggcacgactgcctgggtagtggaaaaagtctatcgctatgaaatgcgcaggttaaaccgtggctaattttcagctaagtatgctctgtctggcaattacgctagttatctattttcttaacaaacgcctttatcgccgctttcgtaaattgccattgatgcctctggtgctgacgcctacgctactggttatgctgctggtttttggcaatatttcctggcaaaactatattggcgaagcgcactggttactatggctattaggtccggccaccatcgcctttgcggtaccagtgtatgacaatcgggcgatcattaagcgtcactggatgtcgttgacggcaggcgtactgacggcaacggtggtggcagtgaccagctcagtgtggctggcgcgattgtttaccctgccagatgagatccagcgtagcctggcggtgcgttcggtcactacgccatttgctttggcagcgagccagtcgctcggcggacagcctgatctggtggcgctgtttgtggtggtcaccggtgtgtttggcatggcgattggcgacgtgttgtttttacgtctctctattcgcgaagggatggcgaaaggtgctggattcggcncggcatctcatggtgccgggactgcgcggtcgtatgaactgggtcaacaasaaggcgtagttgcaagcctggtcatgatgctttcaggtgtattgatggtattggtttcgccgctggtggccaggatgatgttctgaagaa

SEQ ID NO: 209 - DNA, 208 bp, Escherichia coli
gccgttgccgaatgtaggccggataaggcgtttacgccgcatccggcaatcaacgcctgatgcgtcgctgtcgcgtcttatcaggcctacagccgttgccgaatgtaggccggataaggcgttcacgccgcatccggcaaccagcgcctgatgcgccgctgtcgcgtcttatcaggcctacaaatcgtttccgacttgttgcccggag

SEQ ID NO: 210 - DNA, 306 bp, Escherichia coli
gatgcctgactgagtaatagcctgatgtagcgtgatttttgtaggtcggataaggcgtttacgccgcatccgacatcaacgcctgatgcgacgcttgccgcgtcttatcaggcctacgtcagacagcgcaatagcctgatgtagcgtgattttgtaggtcggataaggcgtttacgccgcatccgacatcaacgcctgatgcgacgcttgccgcgtcttatcaggcctacgccagacagcgtaatagcctgatgtagcgtgattttgtaggtcggataaggcgtttacgccgcatccgacatcaac

SEQ ID NO: 211 - DNA, 114 bp, Escherichia coli
ttttgtaggtcggataaggcgtttacgccgcatccggcatcaatgtctgatgcgacggttgccgcgtcttatcaggcctacgccagacagcgcaatagcctgatttggcgtgat

SEQ ID NO: 212 - DNA, 5489 bp, Escherichia coli
  misc_feature (46)..(46): Unsure
actgtaaaaagacctgaaagcagaatgaattaatgcaatgtcaggntttttaatccatccgatgttcccccttttccatggcgtcgcgatcaaaaaatcgctgaatttttccctcggacatcaatgccgctcgatcagacatatgcgcgatgacatcggcatcgtgactgaccagcagatatgtcatttggtgttccagcttaagttgattcaacaaattaaggatttccgcttgtaccgacatatccaacgccgaggtgggttcatccagcagaagaagttgtggtcgtaacaacagggcgcgagcaataaccacacgttgccgttgaccaccggaaagctggtgtgggtagcgacgagcggcgtcgaaaggcaagccaacctgttccagtgcagtctggacgcgtttttctatttctctttcgccacgaattttgagtggttcagccagcgttcgccacagagtatgattgggatgcaacgaggcatagggatcctgaaacaccatttgcacattgcggcggagatcgccctgaaaacgcattcctggtttgatggtgtgcccaaacagtgacacctgaccgtgccagtcgcgctgtaatccagcaattacgcgcaaaatcgtggattttccgcagcctgattcgccaattaaactaaatgtctctccggcattaaccgaaaaactggcggcagaaactgcggttttctcagcaaaagtcacctgtaagtgattaatttcaacaatcgtcatggtatttctccggcgtcattgccgtcctgtccagcgtcggcagcatctgcccgtaagtttgtgcatttgggcggcaagtccacagtgtgcgcgtgtaaggatgcgttgctgtaggtagcgcagcagcgtgcatttcatccaccttatttccctgatacatcaccagcacccgatggcaaaattgggcaactaatggcaggtcgtgactgatcagcaacattgccatctgacgttgttcacactgggtaaccagcagttccagaatctgattacgcaggcgcacatccagtgctgatgttggctcatcggcaatcaatacccggggatcgttgatgagcgcaattgcaatcatcactcgctgccccatgccgccagaaagttcacgaggatagctttgcagtactcgcgtattgaggccgacagcctgaattgcggtgtttattttctcttctttctcgcggcggttcagacgttgatggagcgtaagcgcctcttccagttgcgcttttactgtctttactggattaagcgcgtaacgcggatcttgcaataccatcgcgatatcgttaccgcgcaactgttgccatccacgcgcgttaagggtgagtgcatcacgccccagaatgttaagtgtgtccgcggttactacacccggtttacgcaccagccccatcagggcgcgggcggtcatggacttacctgaacccgactcaccgaccagcgccagacgttcattgcctaatgtaaaactgacattgttgacgacccgggactccggataatcgacgcagagattgttgatactaagacgtgagtcagtcatgttgaggctccagaacatcgcgcaagccatcacccagcagattaaaggccagactggcaattaagataattgcgccgggagcggcggcaatccaccattgatcaaaaatgacctgcataccgtcggcgatcatggctccccattccgccattggcgggcgagcaccaagcccaagaaaacccaggccagcagccgccagaatgatacccgctaaatccagcgccagacggacaatggcagatggcaggcacaatggcaaaatatgaccagccagcagacgcctgccgcggatgcccatcatttctgcggcggcaagataatcactgtgtcgcagacgttggatctcactccgtgcctgacgcgcataagcaggccaggtggttaatgccagcgccagtgcgccgttaaccagccccggccccagcatggcaacaaaagcaaaagccagaattaaacgcggcattgacattactacgtcagtaaaacgcatcagcacgcgttccagccagccgccgtagtacccggctaaaatgccaatcagcagaccgaccgggagtgtaatgattgtcaccaatgccaccagccccagtgccggacggctgccgtagattaaacgtgaaagtaggtctcgcccgtaactgtcagtgccgagccagtgctgacgactcggtgcttgtaaccgcgccgccgcatcctgccagttaggatcgtgaggtgccagccacggcgcgaagagcgcaattagcatcaataacaggataattatcaacccgcaaaacgcggcgggtgaatggcgtaaacggcgtaaaaagagaaacatcggcatcagcgtaacctcggatcggtcagccggaccagcaggtcggttaagttatttatcaacacaaagcagacgccaatcagcagcgttcctcccatgattgctgtggtatcacccgcgaagagcgctgtagtgaggtagcgcccaatacctggccatgaaaagacggtttctgtcagtaccgcgccttccagcattgatgtataggcgagggcgataacagtgagcaaggtgccgcgaatgttgggtaaaacatgacgtagcaaaattgtcatctcgctggctcctttggcgcgcgccagcagaatatattctttattcatttcgccaagacaggcggaacgagtcaggcgcgtaatactggcgagcgagaagtacgccagtaataaaaccggaagtatcaaatggttgattgcattggtaaatgcctcgcgatcgccagaaagccacgtatcaatcagcgcaaatccgctgcggggttctatggtgaattgataaatatcatccagcctgcccggcccggcactccattgcagtctggcgtagaacagcgccagcatcagcagaccaagccaaaaaacagggacggaatttcccagtagagttaatgttcgcacggtgaaatccagcggagaaccgacataacgggcgcaaagtacacccgcaatgacgccgacaacagcaccgacaataagcgccaacgttgccagttcaatggtcgccgggaatgctgatagcaagtcctgaagtactggttgcccggtggagctggcgatgcccagatcgccgtgtgccagattcatcaggtaatgccagaactggacggctaacggctgatccaatcctaactggtggcgtacctgatcataggtggactggctggcgtgatcgccaacgatttgtagtacgcgatcgaccggtgagagagccgaaagcgcaaaggtaatcagcagcaggccgagtagcgtcagagcaacggtaaacagcccttgcaacagcgcgagcagagggcgcttgcctcgccatctcgcgcgagtggaaaaaacgacagacatgatctttccatacagtgataaatcagcggctggcctgcaatacaggccagccctggtaccgcgcccggtaacatggctggacgcgagttgcatacagggttatttggttacctgatcaaaccagaccatatcggcattcaacccttgttgatacccctgcacattatcacgcatgacaatttgcgttttgccttgatcaataaagacatacggggaactacgttgtagttcttgttgcattttcttatacaaatcaagacgtttagtgctatcaggttcagcgatggccgccagcgtttctttgttcagttccgggattttccagccgtttaacccggcaacggtgctggatttgccatcgttataggcgaaagagctggcgttggaatgtgcgtcaaaataatcaggcaaccacatacgaatggccccctgatgctggtgggcgcgaacgcgagagtagacctgactccctgcggctggcagcaaatcaacttttacaccgccctgagcaaagctggcctgaattgactgcgcgatggtaataaatggcggtttattttcgacatcaagcgtgaagtgcgggtctttgattccggctttagcgaggatctcttttgctttggctggattaaaggtaaacggtgtttcttccagtgctccaggaaagcccacgggcaggaaactttgatgggtaaaatattgtccttttaagagatttttggtgatgccgtcgtaatcgaccaaccagcgagcggcctcccagaacgcaggattactcatcagcgggttatccttgttaccggtattgaaggccaggtagttctgttcggcggaggcaatgctcatcacttttacgccaggtttaccctgtaatgcatcgatttgatcggctcccagatcacgagccatatcagcatcaccttgttggatcagcaggcgacgcgttgccggatcgggaacatttttgatgatgacgtttttcagtttcggggcgccggttggtgagctggcgttggcttccatcacgatggcctgatgcggttggtaagtacgcattttaaacgcgccgctgccagcggaatgcatcttcagccattcattaccaaagtcgttatttttggcgtttggcgcaaccagcttctcgtcaacaattgaggcgattggtgtggagagaatattcagtgccagcgccgggctgacgtcggcactccattgcacctggacggtatggtcatcgattttcttcaactggctggcgatattttctggctgccatcccagcacattgagaataaacgcaccggatttattcagtgtgacagcccggacataagagtaaatcacatcttccgggcgtaccggattaccagaggcaaatttcgcatcgcttttcagttttatggttagcgttttggctgcggggtcagcctgccaactttccgccagaatcggagtgattttcgtcggatcattacggtccggttgtactacgcgttgatacagacttggtacagtctgaatacttgagagttcattagcttctgccgggtccagactcacaatatcatccagcccctgggctacaaccaacgtattaggcggtgtagcggcaacggttgtggcggaaattgtgcttaaaaccagtaaaggtaatagttttttaatcatatgcttcccaatccctgaaattactttgaggttattaatatgctatcagacggggtttcgctgcattaatcgcgccagaatatcccgttaatagaacgagttaaatggtcgatgatttctcaccttaccgaaattttgtttatcaaatgtaaagtattattacgttaggccgcgatgagaattgagtaaagataattctcatttgcaatcgtgactggaatagaagaacaaccgagaagacgtcgctaataaccaggatgggctggtttgactgcgcaggtatgtataaaaaaatccggaaacagagagtcgtttccggattgatacaaaggcgttgggtaatatcgccgcttttaacgtgagtttacg

SEQ ID NO: 213 - DNA, 24328 bp, Escherichia coli
tctgatgtcagrcaggcctgyggcaattttttttctgccttatctcctgacgactgaggttcaacaaatgaaatctgtaacgatgcgggagaaatactttgcccgttaacaatcacatccagaagatattgccccggcagaacatarccggcttctgaaaaacgggtgaagtcaatatttttcttgtccgccgcgtcaagtacatctgtattaaactcaacggcactggctgcgttacaaaacagagacaacaatatcacacaggtaatattgttgactgcaaaaggtattctgtctttcattccacgcatcaccagattcacaaaaaagataaataaccggacatctcaccggagtgactcactcataatcgacccggaatcccagcacggcaaaataatttccggcttcaagtttttttccgtttctcacaattctgagggtgtaatccagcgcttcttcattacccgtcaatggtattgcaggcattactttccctgcccgggcaatatttcccctggcatcagctatctgcagattaatgccttttgcctgaccggataaattaaacttatccggcgtttcaccccggacgccatcgaaagtcacccttatccgggaatcagagaaaaggttcccaccctgactgttaaattcacagttcctgagccggaggctgaattttctttcaggtccggaaaaaccattctgtaaatcccgaaccggggtttcccccatatcgataatctgccaggcgtcttccatcgccagagtacaggcaggtctgacaacctcaccatgaaaagcagccctgccgtcccaccatacgtgttcttctccccagtattcaggaagggacatgccgggaggaggaaacggaccggcaaaaacaccatgaacaaacacacagcaaaaaaagaaaagtggaacagagaatcgcagtctcatgataaataccctgagaaataaacagcggaatatttccgctgtttaccggaccagattatcgtattactgttactgataagtcaggttgaaattcgcaactgctgagaaggcaccttcagctacattcttgccactattatctttcttaacaaatgcagtaaaatgaattgtattatcgccattaatcagatttgaagccccggtctcagtggctccatcaaatttcacccgttttccactcgaatcagtaacaacaatcgcagtattagtatctccaactgtttgcagcatgtcatctgcattttctgcaggcacacctgaaaatgtcaatgacactgtaccttttttagctgccccgccttgaagctgtttgaaattagtaatgtcacaattcacaagcttaatattcaaatctttcggttgagtctctcccccctcttgcaggaaggatttagagatctgaccaaaatcaatttcctgttttgcagactgagtttcaataccacacggagcgtcaacaacagtccctttaaaacttacttcaccttgtccttgagggatagatgcagctgcatttgcaccaaaagacaccactgccatagctaccgcaccggcaataaccgacttaatcataaataacaacctctttttcattactgaacacaccagagatatctggcaatttaaaatgacccgattatctttaataaccagatcaatacaaataatattctcgtattttcagggcaggttatttatcgacagaatactgatataacctgtctgctttctgataagggcttctttttttatcttccagaaactccggaatgccataatttagtcaaatgccgacgactcatctgtataataaggtgcaagccttgctgcaagagcattcagccgtataagtctccccagtgttgtactgaaatacccattattcatctggtatttctcgcagacctccttacgggagtgcccacctaccagatagtccttcatagccagaatgaccctgtcactgtgaatagaagaaatacctatcagtaaaaaaaaatgcatttcagacatagacccgggcaacagtacgctctcgcgtatattcagcaaaaacgcatttcctgaccgactgatgacttcatgatgcgccatgtttcccccttctgtcgggcccctggatatatgcttccggcccggaaatactcttcatgcaataagttaaatttagttttttatgttgtaaatattgatttaaacgatcttttaacccacaaaacaaaattaaactagaataaaacactaataataagaatgcactcagataaaaacatcatagtaaattaaatttacagcataaaagatcgtctaaatgcatttttacggactttcttttcacagaaaaataaaacgcaaaatgtgatacatatcaaataaagccaataaaaagcaaattcactaaattgaacaaataaagcaaacacagcaaacacagcaaacacagagaataaaaatacctttccgttgataacagaaagcatgatttttattattcgaagaaactttgttacagtgagatgagtgaatatatgaagaatgaaatactggaatttctgaacaggcataatggagggaaaacggcagaaattgcagaggcgctggcggtaacggattaccaggcccgctattacctgttattactggaaaaagcaggtatggttcagcgctcaccattaagacggggcatggcaacatactggtttctgaaaggagagaagcaggcggggcagagctgttcttccacaacttaataactcaatctgtgggcatgcttcactgaaacagataaatgtcagcgccagtgatataaggcgtaacgactaacaatcttggcgttgacagatgtttcttttctaatttactgaaccggcgcagacttacagaaaaacactccggcaccggtgtaatgccagttataatcaataagaatagaatgacgaatcagtcaggaatagctataacctgcaggctgactggagaatgtctgcaagaagatgaacgtaaatgtcgccagcaccaggggcagggccgggttccacaataccagcgctggcattttgcacattgccagcgtactggcattacaacacgtttcatgctgctgccccccgggattcctcgattcgttgctgcatccactgctccacctcacttttgtaccagcggctgctgcgccccagtttgatgggtttagggaaatgaccttcactgatcagcttgtaaaaccatttatctgtcatgccagtgaaactggtgatgtagttcatgtcgatcaggggatcgtcggcacgcagcaatacgctgtcgtggcttgttgtggtcaacatggtcagaatgtcctctgtgagatttatgaaggttgggcaaatgcgggtgaatctactgaacggagttttcagagctggcctgctaccggataccagggattaccggcaaggtaacgggcttccggatcgcgtacaccacgacgatcgcgggcgaaatcactgaacgcccagatcagcgcttgaaatatctcttcgcagtccggtgaacgactgtccagcaccacatcccgggtgatctgcttctggtacggtgccgcttcacccggtgacatgaagcccagtacgttgctccaggcatcaagaatcagccgatccagttcagagccatcgaaatactcctgtctgacgcacagcaccacgtggtattccggcttttcaggatgacgagtcaggagccagcagagatcacgtccggaggttacattcatcagcgcactgacggtttcgataaagtccataccgaaccagatctttctgctgctgaaggtacggtcatattcacatggcagacgaagcaggatccgtcgtatccgggagccggactgctcacgcagcgcacgctcaaggataccgatgattttgttctgataagacggccagaagggtgccaggctatagtcgaaataaggaatagcattcataagatatgttccgttatgcgcagcccacagtgcgtcctgcccgtgaatgagctgacgtgttatggcttgcggatgagattgatggaataagtgaagaactgaagcagaacgggaagatccggtaaccggcaaggaacagaacaccggattcaggttcaggatgaatgatctccgttgacttcagttcacatcattaatcaatgcggtaagtttttaccgacggagtgtttccaggagcggaggctcaggccttaagcttcagaagtgaggcttacgaggacgccctgcagcaggacgttcaggaacttcattgcagccgtaggcacacagcccgtctttttgttcttctttcgccagataatgcagggcaccgcgaatattatcgatgctttcaggatcgttgtggcgcacaggaatgttgatgttgtatgcataatgcggctgatatgtacagcggtgcgccgaaccacagttatacgtaattgcctgccagcattccgctatccgctccgcaaagggatatatatttttttaaccctctgacgatcgatccagaaaacgacatgcgcatgaaaaccatgatcagccgtccattcaatcacccagaagaaaccaacgatattttcaaattgttctacctgctccagcagcatacgcaactgcaattcaagccagcgatgatcaggttgtaagaaatcaggcgtatctttcctgtagaagaaatccatgcgtaaggcccgcaggcaggaatagcgtgccatcatttgattgatgtgattgtcaagtaaagcggtaaaaaaccagtttggtgtgtaagatttaggcatgttgatgactcctgaaagttaatgatgttttaagctctgtgagcgaattaatgctttcgctcataatcagatctaaaacggtaataacttacagatggtatttatcaggcatgctgtaacagaatggatacgacggattattaacgacacacagcgttgtgctgaagggtatgagttatctgatggcattgtctatagagatgagataaacgaggtgcgaagaaaatacagattcaatacaacacagtgaaatactagactggccccctgaaataccagacagtagatgtatcttaaaataagaggtaggcttggatatatgtctaacactagttctaattttgagattgctggcgttttgttaggaaaagaggtgcgtaaacgtaaaacacctcagaaaaaaaatcgcaattattcaacagactatggagcctggcatgactgtgtcccacgtggcacgtttgcatggcattcagcccagcctgttgtttaagtggaaaaaacaatacctggaaggaagcctcactgctgttgctgccggtgaagacgttgttcctgcttctgaactggccgctgcgataaagcagattaatcagcttcagcgtttactgggcaagaaaacaatggaagttgagatcctcaaagaagcggtggagtacgcacaatcgcgaaaatggatagcgcatgtgcccttgttaccttcggacaaggaatagctccggtaagccgtgttctgggcgtgtcgcgtgcgcagctaacattacggatgaaggcatctgataacaagccagataaacggcgtcagagacgcgatgaggctgcggatgcagaagtcttatcgcgcatcctggatatcattggcgatatgccagcatatgggtatcgccgtgtctgggcgatactcagacggcagtcccgaaatgaaggcttgccgttcgtgaatgcaaagcgcgtttaccgaataatgagcgaaaacagcctgttgttgttacatgacaaaccatcacggctgcagcgggaacataaaggccgaatatcggtgaaggaaagcgaccagcgttggtgttctgatggcttcgagttcggttgtgatgatggcgaaaaagtccgggttacgttcgccctggactgttgtgatcgtgaagccatcgactgggcagccagtacgggaggttacgataaagcgacagtacaggatgtgatgtcaggagcgatagaaaaaggctttggcgataaagtgccggaagagcccatccagtggctgacagataacggttcagcgtacagagcgcatgaaacacggcagttcgccagagagctgaatctggagccctgcacgacggcagtcagcagtcctcagagtaatggaatggcagacggttcgtgaaaacgatgaaggaagactacatcgcgttcatgccgaaaccgaatgtaagaacggcagtgcataaccttgcagtagcgatcgagcattacaatgaaaaccatccgcacagtgcgttgggttatcgctctccgcgagaatatcgacgtcagcgggtaacgttaacttaagatacatccactgtctggcatttcaaggggtggctcaagttttttcagacagttgaactagtataccaatacattcttgttcagcatcaatgatacatgcttggtatgtcggaaagaaaacagatgcttgttttacgatatatccacagccataacattgataccatttccagcctttttcctgaatgtaggaaatatgtagaaaaagtggcaagactgattcgtctgagtacccctgttttttagcattttcaatgcataacaattgcgaattatatgcgttatctgattgagacaaaagatatccatttttctcatgacaataccatctccatttattgtcatcagttttataaaatttccatattaatctctgattgccagatatcttataaatcataatatgctccactccccagggaaacgaccctggggaaggtaattagtgctcttttatatatgcggctctgtgacgttcaagttcaattgcaccacgatgtgataaccagcaaaaaatgatgcaacaaataataccgcagccaagaagataaaatccgccatgccagccaatatgatcgaccataataccaaacaggctggtgcccagagatgcaccgaagatatagctcataaaaccacgtaaacctaccgcggagccaacagcaaagctgggcacgatctccatagtctgaacggaagccagaaattgtggaacgtaaatcagacaaccaacaatggcagcaaaaattgtcaccataaacaacgattcacttttccagtagccaatcaggcaaatgaaaatcagcgccatacaaatcatcgccaatggcatacgacgccctttaaacagtttgtctgacaaccaaccggcaagtagcgtggaagggatcgcggcccattcaaaaaataaaaatgcgacgctcatttgttcttttgaaaaatgtttcaccgtcagcagataaataggcaaccagctaatcatcccgaagcgcaccatgtatacaaatacgtcaaccagtgagacataccaggcatttttattgcgtaatacataagtgcagaaaatctgaaaggcgctcatgttttctggtgcttttaccgtctgtcgggtattcaggacgactttttcttccggcatcatctcttccagagagggtagaccttcctgatgtggggaacctttaccgagaatcagcacaattaccgcaaaaacgatggccacgcaggccggaacgatataactcgcactttgccagtgctcgctgccgagtagggcaaaagcggcaccaacaatcggtgcaacaataccaccaccgatgttatgagagatattccagaaagcaccaacccgaccacgctcccggcgagggaaccagttagcaatagtgatgaaagaaggaccaacgcccattccctggaaaagaccattcagaataaccaatgccgcaaaaatccagaatgcggtgctgaatcccaggccaacgttaacgatggcacataacaccagcccacacgccataaagactttcggactggctttatcggcaaggctactcatcactcctttgctgataccataggcgataagcatacagctactcagtacgccaatttgtgtggcgctgagatctaattgctctttaagataaggcgttgataaggtgaaattattacgcacgatatagtatgcaagataccccagaaatacgctaagtaacgcctgcatacgatagcgacgatatgtcacctgaattttctccgccggaacactatccgccgcttgccccgttttaaatattgataacatgtcttcacctgtattttatattgatatgaacatcaggagtattctgacaatgagagttatataattgagatgaaatatcaaactgaaaaaatgtgtcacaattgacacaaaataataaaatcaaagcctgtttttgacccattttattgatgcatagacagggcagatttatgctttatctggtttgttgttagcatgtgcggatattaacaaatctcatgctgattatcgggtaatctctgattaatatattaacggtctctttgaacagacgtgttatcagacgaagtgtctgaaacgggtaatttttgtctcaatgcgatttttgcggtgtattaatatttatgacctggatcacaaaccgattctttagttggtgcgaaatcggcatcaaaaccatgattcttttactgttgttgatggatgtcggggccgtcagggctcaacgaaatgaactggtgatggccaccacattctcacccggagctatcgcgtggataatacagcgctggcaaacagagcctgagtcggtaatgatccgtacgcttaaccgcaccagtgcctcactggaacagttgcttgatacggccaacgtagaaaacgtcgatctgatcctgacttcatcaccaatgctgctccagcaccttcaggagcaccagaaactggccccgtttgatgatgcacccgcagaaagccaaaacctggtgccggagtcgatccgtgcaacctccgttgcagtagcaatatcaggttttggtctgcttattaatcgtcctgcgctttctgtaaaacaccttcctgcccctgctgactgggacgatcttgctttgccgatctatcaggacgctttattgatgagtagtccgtcgcgttcagatactaaccatttaatggttgagtcattactacagcaaaaaggctgggtgaaaggatgggaaacgttgctgacaagtgcaggaaacctggtgacaatctcctcccgcagttttggcgtagccgataaaataaaaagcggactcggcgttgccggccccgttatcgataactatgctaatttactgttaaatgacccccatatctcttttacctatttcccccggtctgcggtatcccccacctacgttgcaattctcaggaaaagcccacacgccgatgcagcccgtcgctttattcactacctgttaagtccgaaaggacagcgtattctggccgatgccaatacaggaaaatatccggtgacatcacttgccgcagacaatccgcgggcaacgcaacaacagctcctgatgaatcaacccccgctgaattatcaccttatcctgaaacgtcagcgtctggtgcagcgcttgtttgatacggcaattagctttcggttcgcacagctaaaagatgcctggcgagcgctgcacagtaccgaggcacgcctgaagaaaccattaccagaaatacgtgcactgttaacacaaatgccagttgcagcggccagtagtgaagatcccgtctggctggcacagttcgataacaaaagctttgccgagcagcaaatgatggaatggcaactctggtttctgaataaccagcgcctggcgataaaaaaactggaagagctgaaatgaaaaacataacgctgtggcagcgtttaagacaggtcagtatcagtaccagcttacgttgcgcatttctgatgggggcacttctgaccctgattgtcagtagtgtcagtctgtattcatggcatgaacaaagctcacaaattcgttactcgctggataagtattttccccgtattcactctgctttccttattgaagggaacctgaatctggtggtagaccagctaaatgaatttttgcaggctcccaacaccacggtgcgattgcaacttcgtacccagattattcagcatctcgacaccatagaacggcttagtaggggactgtcatcccgggaacgccaacaactgacggtcattttgcaggacagtcgatcactgttatccgagttggatcgtgcgctttacaacatgtttttactacgggaaaaggtgagtgagctatcagcgcggattgactggttacacgatgattttactaccgagcttaattctttagtgcaggatttcacctggcagcagggaacgctgctggatcaaatcgcctcccgacagggcgatacggcgcaatacctgaagcgatctcgtgaagtgcaaaatgaacagcagcaggtttataccctggcacgcattgaaaatcagattgttgacgatctgcgtgacagactcaatgagctcaaatcaggacgtgatgacgacatacaggtggaaactcatctccgttattttgaaaatctgaaaaaaacggcagatgaaaatatacgtatgctggatgactggcctggcaccattaccctgaggcagaccatcgatgaattgctggatatgggaatcgtaaaaaacaaaatgccggatacgatgcgtgaatatgtcgccgcccaaaaagccttagaggatgccagtcgcaccagggaagcgacacagggtcgcttcagaacgttactggaagcgcagcttggcagtactcatcaacaaatgcagatgtttaatcaacgaatggaacaaattgttcacgttagcggtgggctgatcctggtggcgacagcactggcgttactgcttgcatgggtattcaaccattattttatccgctcacggttggtgaaacgctttaccctactgaatcaggccgttgtgcaaattggtctgggaggcacggaaacgactattccagtttatgggaatgatgaactggggagaattgcaggattattacgccatactctcggccaactcaatgtgcaaaaacagcaacttgaacaagaaattaccgatcgtaaggtgatagaagccgatctgcgtgccacccaggacgaactgattcagacagcaaagttggcggtagtcgggcaaacgatgaccacgctggcccacgagatcaatcagccgctaaatgcgctgtcaatgtatctgtttacagcccgcagggccattgaacagacccagaaagaacaggccagcatgatgcttggtaaagccgaaggggtgattagtcgtattgacgccattatccgttcactacggcagtttacccggcgcgccgaactggaaacatcactccatgccgttgatttagcacagatgttcagtgcggcctgggaacttctggccatgcgtcatcgctctctgcaagctacgcttgttctgccgcaaggtacagccacagtttcaggtgatgaggtcagaacccagcaggtactggttaacgtactggcgaatgcgcttgatgtttgtgggcaaggcgctgtcattaccgttaactggcaaatgcagggtaaaacgctgaacgtattcattggcgataatggcccgggctggcctgaggcattgttgccttcgttattgaagccgtttaccaccagtaaagaagtaggactgggtattggtctttcaatttgtgtgtcgttgatggagcaaatgaaaggggaattgcggctggcatcaacgatgaccaggaatgcctgtgtggtactgcaattcagactaacggatgtggaagatgctaagtagtgaatattcgattctgctgattgatgatgatgctgacgtgctggacgcctacacacagttacttgaacagtcgggctatcgtgtttttgcctgtaacaatccttttgaggcgcaggcgtggatacaaccagactggccaggcattgtgctaagtgatgtgtgtatgcctggctgctctggtatcgatttgatgatgttattccaccaggatgatcaacagctccccattctgcttatcaccgggcacggcgatgtgccaatggcagttgatgcggtgaaaaaaggcgcgtgggattttttgcaaaaaccggtcgatcccggcaaattgctttctctggttgaagaggcactacgccagcgtcaatcaatcattgcgcgtcgtcagtattgccaacagacattgcaggtggagttgatagggagaagtgaatggataaatcagtatcggcgacgtttacagcagttgtctgagacagatattgccgtctggctctacggtgcccctggcacaggacggatgaccggtgcacgttatctgcaccaatttggacgtaatgcacaaggcgaatttgtctaccgcgagctgacaccagacaatgcaccacagcttaatgatttcattgcgctggctcaggggggaacattagtgctcagccatcctgaacacctgacgcgtgaacagcagtaccatctggttcagttacaaagccaggaacacagaccttttcgcctgattggtattggagacacctcgctggtcgagctggccgccagcaaccatatcatcgcggagctctattactgctttgcaatgacacaaatcgcttgcctgccattaactcaacgccccgacgatattgaaccactgtttcgccattacctttgtaaagcatgtcaacggcttaaccatcctgttccggaagtgggaaaagagatgctcaaagagatgatgcgccgcatgtggccaaataatgtgcgagagctggccaatgcagcagaactatttactgtaggagtattaccgctggcagaaacagcaaatccgttgatgcacgtcggaaccccgacaccgcttgacagacgagtggaggacgctgagcgacagataatcacagaggcgcttaatatccatcaggggcgtatcaatgaggttgctgaatatttacaaatcccacggaaaaaactctatctcagaatgaaaaaatacggtcttagtaaggagcattataaaatttaaccatcagacttgtgcgcttgttcataatgttatgtcattgcctgatgttgataaaaagacggacgctccccctgtaagacctgtctcttatacacaagtccccacccggggatttgtgatgtctgtcagtctgctttagggggggctctttccatccggtactttccttcctccccggtagccattttttgaactttttcttcacccgttgatcttctcttatatttcattttattcgactctgttatggtactttctgattgttattcatgggctaacgagcagtttggacatgcccgtctcgatgatccgcgtagtacacgacgccttgtatcactggcctcttctctcgctcatgccaggtcgtgatcgattcagatgccattttgcaccttcagaatttgagcttgctgcagttgttcctgataaggatctggataaatatgacgagtatttaccagagtctttgcttgcgaaagggtacggggcaaaggcgtatgatatagaaagaacgagcatctggttgctgaaacaccttcagtggactggatatatagtcagtgtataaatgcttgtttatacccttatttttttacttacctgtggacttacttggctttagtcccggagtattgccaggagtatctttattatcgcgtcggcgttgatccggttttcctaccgacttagcaattggttttggacctggtttaagacccatgatagttatccttcgagatgtaagaggaatgccctcaacattggtatattctatactgagaaatttttcaatggaaatgttcaacggccgaatgattaacttgatattgtgagcaatatctttttttggcacagagcgaaccgttagattgcgcgtatttttatggaaggagatcatccaataacggttactcaccgatcttcttcatggtaatacgcacctgttttattaacatatagaaaaattactccggcatgttttatctttttgaaatcaggacatttaccagatcacttaaaactctcttttgttcttcatcctgaagatattgaatccggaatttaatctcttctgccacccgtcttgtatcggactcattaagtatttttgttattcgctgtctctgatgttcaggctggtcttccatatttcgtaaaaccagatgaaataatatatcataaagtgcgcaatgccatgaataaccatcattggttaaaataagctcccaaacccgctcctgctcggcaataagctgcagaacaaaggactcaacctgttctgtttgttcggggacaacacggtatagcggagcaatcacagcaaaagacagttcatttaaccaggattccgcttccttctcgctcctgaacgatggacagttttgtattcttcgttcgtattcacgggtaatctgctccagaatatcctccggcggtgtcagccacttattcctgagcaatacactggttgatggatgacagctggctatttcagcaataatttcacgtaatgtctccgggctgaacttcttcagctgattgtagtgctcccgggtaaaaccatgttcatcgcataaaagttgccatgtcattgacacactgtccgccatatctttcttcatcattaatacctgttacctgaatatcaacagaccggtgtaccttttctgaatatctccccggacgggctggcaatccccattcgcctcagcgtggcatctgcagctttcgccacttcgctgatatccagcttttcaggtagcggcggggacgatatctgcgccagacaataattccggcgcaacaacaaccactcccgttgtgcttctgtacattcaacatttcccataacaaaaagccagcgggcagaagctctgcgccagcaacccgccgcctccagcttctgtgcaaccatgtcttccacgacttccggggtactatttttcctgctcaaaacatcaactcactgaaataatactcatatatgacggtctcagcgaaccgtccatgccgggctgaaatcctcttcctgaaacaactccgtcagtccgctaatctgtttcagcctcagcacttcatcctggtccatccccaggctctgtaccaatgcgttcatccgtccagcccaggcgtgacaggtccctgacaatatcagacattgaggttatctggtgtttacccctggcccggttatgccgtatggtggccgccatacgtgtggcctgtccctttctttccggattaatacaggccactggcaaccagcctttcaggcgttttcctgtacctgcttccctgcccagtaactgacgatgaaaaccatccaccaccagataggggttcttctccgccgacaccaccacgggttgggtgaaaccatctttctccagtgactgcttcagcagtttcttctcacccggcgccatgacattggggttataatcgttggccaccacctcatctgctttcacccacagcacacagtccacaggctcctgtgcaaaagggctgacttcatgaagtaccctgcgcagatgattcagagcctgtatagtctctttttctgatcgttcctggctgaagtactgacgaatcatgtcactcagtacctccacttcaggtgtcacagaatcccccattcattcctcctttccttcatacgctgcaggtaacgttcatagtgccggggtttgttcgggctgaaggacagcgtccggcaccagaaatcattctttataagagtcttacagatacgtcgccaggacgggatatcccggcagcccaggtcattctcctgttcatcgggaatgtcatccgggaagccccgcgtctgataccagcgcagatagacagctatcttgttgcggtaatgttctgctgttctttccggcatcacatccagcagaaacatcgcgtagctgcgccaggtatgatgggctggttttgatatgcgcttgcgcagggcaaaataagcaccgctttcattggcataaagtgccccgctggcagcccctgatacccgctcacacatcctggcccaggtatccggctccagaacatggtaaagccacagtcccttacgttgttcaggaccaaaaggttcacagacacgcatgttgcgtaacggtacgccggcacggtacatcaggtcatacaggggattgtagatggcacgggttctggtgtgatatatccagatatcacgagttttccagtcatacagtggatacatggtgtagtaaaacccttcaggcgatgccgtggtccagggcttatcatcggcgtatctcagtttgcgctgggacaccagtcccatgaaccggttaagggactcatccgcacggacaccggtcagtactgccacaccacatttattgtctgcaaaccaggaagaaaatgccggaacaaattcttcaaacgtcatggcataccgataaaatgggaaatacgtcatgtctgtaatggcctcttccggtggctggcgaacccaggtcactcctggctcccagcatatccactccggctgaaactgcgagacgccgtttaccgtggtcaggggaagtgccacccagtaaaaggtttccgtcacatcatggtacatttcccgcatcttctgaatatgttcaatggtgcactggtactgagcctcccagtcaataaacagtacagagaaacgacgttttttcctgcgggccacatcagccaaaagatggaaaagcacggtggaatctttacccccggaaaaagagagacaaactgatggaaatgtttcaaaaatccactcaatacgagcaattgctgcacgcagaacattctctccagtaaggactttctccgttaataaattatcattcatttatttttactttatgcaaaagaaacccgttgatatctccaatacatagcaacaaacattaaataatatttaattaattattacagagatcgtttttacccttatatataaagtaagctacatacataaattttttcaataagagatttttattgctgatactggcactgtaacaatcccagtaagagaacgattaataaccacccactcatgtggttcaaccagccaggagtttacatgttctgaatcaataaaatcatggcaatataatatatctgaagcaggtatatccaattccagtttaacacgtccgtgatattcattcgcatcattaaaagaattcaatatatccatctcaaaagaaattaccccctcccccctcatctctgctgtttcttttaactcagcaatcatatctgcatacctgccattaagtttcctgcctaactggacagttgtaattttcttttcgttgcagcatcgctgagtatgttcatatatagccatcacttcccggcaaatacaatcaacttctatatcactcaaagaattatatatatccataacttttctctcataacgcaaaaaacgattaaatatacgataatgagagagcaaatcaggatttattacttttattaaaaataaagttaataaaacataacctatctgtttgctaccattaaacccaataaaatcacttaccacatctcctttcaatctacctgttccgatacaacgagctaacaattcactcctgacattatatttaccattcatattcgccacactatcctgaacaacaaatgatcaccaaaatgcgtttaaataccctacaaacaaactatctcactgaataaattgcaacacttccccttccacaacgtcctaaaggctttatataaaaacagcaaaaacgaattagttatgcaaagtcatttatatgaaacccagccattaaccaatgttataatcagcatcccataacgcgaacattatcactttcaccattattttttgcccatatttttaattgttccatgagttgagcattaaaatcatcatcgggttcaaagtcatcaggatcataacactccccttcaaacaaattaattataagattttgaatcttttcttttaatttttcatcgcgcgaaattcgattaaatgctgtatagggtttatctttccccaactcctcaccacctaaaaaacgctcaaaatcgggggcactccaacgatgatatacttttttcccattattcctgcattttataatctcatttctaatgatcgtattaagcgtccatgaaccattattcgaaccatatctacgataaggccaatcaatatcatgtacaatcccaaaatctgctttaaaatgatttaacatctttatcaaaggaaccagaaccgccttacctctggctctgacaatacttaccttacctgacatctcatgtttttctttagtgattgctgaaataaatgccgcatgttcagtatcaccttcaacaataattggataactcccaaaaaatatttcagcaaaaccaatatctgtaagttgtagtgcctgtaaattatctttctcatcaggtgagaagttagcttcatcagccacatacaagcgtggagaaagtgatttcccatctgttgaacgttgcatacgagcaatcgtagtatgatcctcaagagggtttataaagtatggtgaatgagttgttaatagcacctgccaatctggatgtttaccaagttcataaagatgcgcttgcgccgctctggcagccattgggtgtaacgcattttctggctcatccattaaaagaatatatccgggcaaggctggatcgtctgtatcttcaggaacaggggcgccattttcaatagcatctatttgttgtttcagcagatttatattttcactttttacatttttcctcacctcttttttaagttgttctctaaaggatttaagaagagcttctcgcttttcattttgtcggctaatttcattatgaacctggagcattgcccaaaaaagagctcgtcttgctcctgtcccctgttgcccaatgcgagagtttcccgcagcctctttgactaataaaccagacccctgctttaataaattgtctattttaagctcaggtggattcatttcaacactgagctgaacaccaagagcaggaaagacatgttgaaaccctgtctgaatttgtcgagaaatagaagaaaatcgttcttgatgaggttcagcgatctcatttacagctttaaccaaagctgctttaacttttgatatttgtgactctttattacactccagagccttcaactctttcactaagggagtcaacgcaagagtgagcaatgtctcttctgtagtcgctgcatcatccagtgatctaattcgcattggtcttggcaaacgtgatttaaaaacattatcggctccaccggccttgctgtcctctgaccagtcttcagtctgaggatcccatgtttttcttgttggttttcccgtttcatcccaaacccataaactgaaccgccccgggtttcctggagagtgttttatctgtgaactcaggctgccagatcattgtttccgatggaagcataataagctttttctgcttctgccggaggagtatggcccagccttcccagcaatcgtcgattgttataccagtccacccacgttagtgtggccagttccacttctgcacggtttttccagctcttacggtgtattacctccgctttgtaaagaccattgatgctctcagccatcgcgttgtcatacgagtcgcctgtacttcctgttgatgccagtaatccggcttccttaagccgctgtgtgtaggccagcgatacatactgagaacctttatcactgtgatggaccgtgccggacggtcgacgggcccacaacgcctgctccagcgcatccagcacgaatgtcgtttccatagacgatgagacccgccaccccacgatgtatccggcaaacacatcaatgataaacgccacatagacgaagccctgccatgtgctgacgtaagtaaaatcagccacccacagctggtcaggacgttctgccacgaactgacggtttacgcggtcacctgtggcaacggttttccggctgacggtagtgcggacctttttaccccggagaacaccggcaagtcccataaccgccatgaggcgcgccactgtacatctggccaccctgattccttcccgtaacaactgacgccagactttacgcacaccgtacacctgatgattttcatcgtatacgcgctgtatctctttcttcagccagtcatcgcgctgcgcacgggcactgcgtttatccggatgatgtcgctgttgctgacagtggtaatacgttgacggggcaatatgcagttcgctgcatagcggtccgaccccgtactgctcacgcagcttatccagcagtggcatcattttttccagaggcggtcgaactccgccttcgcaaaataagcggaagcctggcgaaggatatcgttactgcggcgcagttcacgattttcacgttccagctctttcagacgctgacgttcagcggtggtgagccctccatcaccgcccccggtatcccgctcatgctggcgaacccagacacgcagagtctccggcgtacagccaatctttggagcaatggaacaaattgtcgcccattgtgagtcatattcgctctgactttccagaaccatacggactgcccgttgacggacttcgggggaaaaacgagtatttttagtcatcctgtttacctctttctcaggaagtttagtctccaggattcccggggcggttcacagcctctgccactcctgaaccgcctgctgttctttaagaacgatttcatgggcggagtcaatctgctgccggtatgttgtttgctcgcgctcagcggaattgagcagcccatcaatattacgttcgatagtttcaggatcagaccactgatttcctgcaatcagcgcgcctaatttatcttcgagaaacagctgtatttggtactgtcgcttactacgaaccgctgggagccaggaaaataatgaatagatcagtgattcaccggcgcgatattttttccattccgttttagcactcttcagtagagtgactttttgttcttgtccggaaagtaatttatttaaattatcgagatattgctcaatatcattagcaataagctcacgcgcagcccgtacctggcttaacgtttgccatgttgcgttcagtcttttcaattgctcggattttgctaccaactgaccatgcaggagttcaatgaccttttcaggggatgaacactctttttcaggaaaagctgccttagctttctcgagataaaacagcagtgcatcctctacatactcttttgactcaacctggttgaagaaatcttcagtttgatattttttggctgcctcagctttacgagtgcttgagggaaaataagcgccgaagcttttcagctcaggtaaccatcgtccggccattgcaccagtgccctgtgaaaaatctttcccgaacgcttcgataatgttcgttacagcctggttgttcgttgaagtcgcgataataaccggaggctcagatttttcgagagccgctctggcccactgcgtggcgatgatagaaagcaccagcgtggtttttccggttcccggaggtccattaacagcaaggatatcgccatgtcttgcatccagaaaatggcttaaggcatcgcgctgagcctttgccagcggaaacttatctccggagtgtccaagcctgtcgctgaattttgctcctggggccagcaaagactctgcagcatgaacctctcgcgaggcgaagcgattgaagagcggcacatccttcttgcaaacaagcaggtgatcataaagcgaaaggatatggaaactggcaccaccagattgcgccgttttaacaatataaccgtgctcagcgagttcatattgctcaggatttttaatccagtcgccggcaacgttcttcagcagcctctctgaatcatccagatattgacgccactcctgctgcaaggctgcatatcgtgcttcccgttcttcatccgtttcggcagtcttatcaatgctgtcatcaaagttgatagagaacgaggtatggattgtcttgtatttgtcatactgcccaatctcaccaatcgaaaatgctccttttggcaaaggttcaagcaggtctctgggaatggaggtcgctggcgtcggatataaaaaaccctcacggcttagcaaggctggcgtcactagcggggtaacaatatcaggtgcgcctgcggaacggtccttaccatgctgcagtaaccggaaataaacttttgggcgcaagacgacatcgaccgtttcgacatcgtctttttctccctcaaaaaatttactgacaatcgcttcgtcaagacgtcccgccgctatcccatgccagtgagtgaaatttttggcgtctttccgttcaaaactgccctttcctgactcagcatccgcaagcgagttgcgccagtatgaggcaaaccctaaagcattttcatccattaccagtcccatgactcaatgaaatccattgatttatcgaatataaaatcaccgtatggacagctattgtccatattgaaaaagttggatgcaatgttttgtttataattcgatatcaaatgaactggttgtacgaggttcagaacacaagctcattaaacagtacgtcaggactgttgatttcataacagtgaatacattttttaccgtttataataattgcctgtgttggacggggataccagagcagccgaaaacaccgggggttattacctgctctcatggaaaccatatattcctggtgctaatcacagtcataaatagcctgaagaacatgacgaagggactttaatggacgccggagtaacttgccagaacatcaatcttcgtcatcatttacaaagaaaaataatcagttaaagcagtccgggctgattgcccggactgcttactattttaatggattgttaatctttgcatattcaaacggactgatacccttctcccggttcgcatccagaaaatcggcccaccattgcaacatcagtcgccgttcttccagatgttctgctttatggatatacgcagcacgtacaccattacgctcctgatggctcatctgacgttccacagcatcgcgggaccacaaacctgattcaatcaatgcactgcacgccatcgcccggaatccatggccacagacttcctgggttgtgtcataccccatcaccctcagggccttatttacagtattttcactgattggtttacgcgggtcatgtgcacccgtaaatatcagaccattttcaccagcccatgtctgaagttctgtcagtatggctacagcctgtttgctgagtggcacaagatgtggtgttcgcatcttggagccccggtgtgagaattttacgccgggcagaggttcgcgttcggctggaatagtccacatggcattgtcaatatcaatttcagaccaccgggcgtatctgagttcactggaacgaataaaaaccagtaaattcagcataacggcaagctgggtgacaggttgccccttgtaactgctaatacgcgacaaaagttcaggcaggcgagaaagatcaagagcggggcgatgctggcgttttaccgtggtcaatgcgccagccatatccagagcaggattatatctgatgatgccagactgtacggcataacgcattacggcagatattctttgctgcagacgactggcgatttcataaatttgtttagcttctgcagcacgaacagggataagcagatccggggtattgagtgttgtgatatcccggttgccgataaaggggaaaacgtgagtctcgaggcttttgagtactttatcgctgtgtgattgtgcccattgtttattactggcatgccagcgtcgcgcaatatgttcaaaagagagctgtaaatcagggactacttttttagctcttttctgttcgcaagggtcaaccccctccgaaatcagttttcgggcctcatcccgttttgtacgagcttcggagagagaaacttctggatacacaccaagtgccagagtcttctccttacccagaatacgataacggagacgccagtaacgggagccattaggatgtaccagcaggaacatgccagccccgtcagtgagtttataagccttgtcagtgggctttgcagcccggatttttgcgtcagtcagtgccatagttcagccttctgaatgcgttaaagagggtacaaattctgtcgaactggggtatgcccgcaattatacccacacaatggggttgatgtggggggaatctggttgagttcggtagaattgatttgt

SEQ ID NO: 214 - DNA, 164 bp, Escherichia coli
tagctctcgactgatcatatgaaatcctgcaactcatcgtctctccggcgatgagttgtcaggaagtaatgcgtatggatgatactctccggggccagtgataactgaagatgatgttaagctgctaaatgagccacgttgacatcatttggcagcttcatgca

SEQ ID NO: 215 - DNA, 10132 bp, Escherichia coli
taagcgataaaaaccgcagaaatagacgttccctccataaatctcttgctattccttttataaaaagttcgcagtacccatacctggcccccagcctcgccgctggtagttcgtgtcatgttttttacgcgtaaaacacgacaaaagcatcaatacagcgatcgtctcacttgtatgataataaaaacaatatgttatatatgaatgtgctgttattttattgtttttatatataaaaagataaaatatcatcactttcgtaatcttgaacgctttgcaggtgcgttcaatccaataaatgctaatattatggctatcatagccataaaaagataaaatattatcactatgggtaaaaaaacagcaccgttactcccttatacgaatcagatgcttagtgaatttggtgagcggctgaaacttgctcgtttacgacgcaggcttaccgcaaagcaagttgctgaacgtgctgggatgtcgccaataacattgcgctctctggagtcaggaagtgcaggggtcacgataggggcatatttgtctgtgatgcaggttttgggcctggaaacggatttaaataagcttgcagctgaagacgacttagggcgtcagctccaggattcccgtttgattaaaaaaagagggctttctcgtgcatcaagtaagaatgaagaaggttctcagacagcctcattgcagatgaggcacgagaaagaaggtcatctcaccacggatttaacagcactggcagaaggctcgacgccatctattacaggagaaacatcaacctctcttgcagcactattaaaaccgataaaaaaaccgttaaaaggaaattaattatggcattaatcggagtgtatgcggattgggaaggcctggatggtccggagcggattggttatttacacagtcgccgcactcggacgcgtgagatatttgagtttgagtacgataaaaaggcgcttgcagatccttcacttaatttcattcagttagatcctgaaataatgttgtatgagggagcacagtacccaattcctccaaaggataaatttggtgcatttagtgattcctgcccggatcgttgggggcgtatgctaatgaagcgtcgttttgagagggatattcgagacgggttatgtgataaagactcccacctttatgagtctgattatctactaggtgttcatgatctttatcgggttggggctcttcgatacaaacgtgaagacgctggagagtttcttgataatcgcattgatgttgcagccccaccatttaccgaaatagcgagtctggaaagggctagccgggcaattgaagaagatcctgataataaagagctaatggggcaaaaatggttaagaatgctaatcgctccggggggatcattaggggggggcacgtccgaaaaccagtgttgttgatgaagctgggcatctctacatcgctaaatttcccagtgtaaaagatgagtatgatgttggtggatgggaaatggtcgttaatgcacttgctgttggctgtggactgaatgttgcacctgctcaggcgcataaatttgccagcaattaccattgttttatggttcgtcgttttgaccgcactaatgcgggaaggcgtctgcattttgcttcggctatgacactaaccaggcatcaggatggtgaagatgcctctacaggtgtgagttatctggaattagcagatgttcttatcagacatggagcgcagactaatactgaccttaaggaactctggtccaggattgtttttaatattcttgtttctaataccgatgaccatttacgtaatcatggatatatcttgataccgggaaaaggttggcggctttctgaggcatatgatttgaatcctgttgccaggtctgacggtctaaaactcaatattacagaaaatgataatgcacttgatttggaattagctcgagaagttgcggagtattttcgacttggtttgacagaagcagatgacattattgctaattttagagggattgtcagtcagtggcgaatcattgccgagcgtcttcgattacctggtcgtgagcaagagttaatggcagaggcgttcaggggggcaatttagaatagttattttgatatattcgctaaatcataaatttgcgaagcaatgccagtagatactgaacgttttggaagagacgtttaatttatgagaaaaatagaaacgctacaaagctaaattatagcgtttctatgtaaaataattagcttgtcgctaactgtacttgtggttcttcgtctttaactttgataagcatccacagcgcaatggcgccaataatgtcaaagaaagccagggcaataaagaacggcgcgaagccaataatgtgaacgaatgccccgataaacaggttgaaaatcaactgaccgctccatgcacaggctcctgccatacccacagcggtagctacttcgtcttttttgaataggtcaccgcccagagttgctgcaacagtagaaagacattgatgcgagaatgcgccaatgctaatcagtaatacggcgatgtagggattttcgacaatactcaccagaccaatcgtcatcataatgacggctgcaatagtgaaggtaattcttcgtgagttaattaaactcacgccgcgatcgtggaagaacttcgcgacaaaaccactggctaaacagccgagatcgcccagcaggaaaggtagccagacgaacatggcaatttctttcaggctaaaatgcagcgtttcgacgaagaaaatcggtacccagaagttaatggttccccatgccgggtcagcgagaaaacgcgcgatgccaatcccccagaaattacgttggctgaggatatgcttgattgacgttttttctttcttatctgttttaagatgctgttcttgcccagactcaatatagtggcgctcttcatcagaaaggcgtttagcatcttttggatctttataacaaaagaaccaaaataaagccgcgagtaaagcaaggctacctgagacaataaacgcaaattgccagctatgaaacataatgcaccaggcaatcaacggtggagcaagcatcgcgccgagtgaggtgcccatattgaaaacacctgtcgccacgccacgctcttttgccgggaaccatgttgatgcggtttttacacccgcaggaattgccgatgcttcgctgaaacccatcagggcgcgcataaatgccagacctgaccatgttcctgtcaaggcatgccccattgtcgccaggccccagattgcggcacatatcgcaaaacttaacttcagacccacggtatcaataaagaagcccattatcggttgccccaatgtataggccaactggaatgcactgacaatccatgaatattgttctttggttattccggttgtctccataatcgttggagccgcaatacctaacgccgttctgtccagataattgattacagtgataaagcatacgagggcaatcatatgccatcgataattctttattttattcatttttaaaccttttaattatattaataaaccctggttgttggtatttccatgtaataggcaataaaaatcaggtacagaggaaatattggaaattattgtgtgtaaatgtctccctttaaaaagtctggccagtttttttcaaagtaaataccgttaatacacggttgcatacgtaaagactttacttcggtaataaaagaaccttgcgaatattgaattgttaatttgtgatttttgtcttcagcgagttcagagcgaaaacgccattcttcttttgcgccgcgacgagtttgtggtaggcatttgccttgtggatcaataaccatacgcgccccacggctaccaccaccagcatcaatataatgcgttaattgtgttaataccgcggcagaagtcagcgtcatatgccgccacataaacagctcggcaacttcacccacatgtttgattgccaatccatgtcgttggacaaattcgttcaatagcagggcatcacgagtggcacgtcggactttatcggcatggcaaataaatcccgcatagtcagacattcgtgcctgaattttttctctcacaaccgacaacggcatcccggacccgttatcgtgcgcctgagtaatgatctctcttatagaagccagtgccggagctgccagctgtgcaatatctccatcaatattccgcttttgcgtgcaaccaataaagcgcgccagacgaacagcaaaaacctgcccggcattcaacgccgcgccgccaggtcgggtgacgccgtgtgtgccagcaacttcccccaccgcaaaacaaccgggcagagatgtttgtccccagatatcgacttcaatgccgccattcatgtgctgattattcatggcaaactgcaatggctgcgtgatgagatcgtaaccgtgcatcttatacagcgagatagacagaggattcatttgttgcaggcgttcgatgggcgatggtgccagagcgtcgttattttccagatacgcgcgaacgtcgtcgtccagtcgatctaatgagaacggtaggtcacccggcacaggttctggattacgattgaaatccataaatacctgacgaccatgttgctgctcttgcgctactgccatatctaacaagctggagccaaaatccattacccgcgtggcgtggaacggccactgatagcctttacggaaaatgtttgaagccagctcctgggtggtgcgatagtaatccgcgaggaagttatactcgttgcccccggcatccacggaatagatatatgggatcacctgtacataggtgccggacaaattccacggaaacgtgctgcgcggtgtgcctataccaaactggctttcagtcagattcgttaacgtcagaccttcctccagcgccagccccagcgagccgaaacatttgtgtggatacacactgtcgcgataaagctcgccaggccctcctgttgccagtaccacattgggcgcagtcacaattgccagcccccatgggttatgggcgcgatgaccggtcgcgaggattgcccccgccacacggtcttcaccgttttcgtcacgctgatgcagcagtttaatcactgttgcactggccaacattgggatagcaagacgctgtacttcttccagcagcactttcaccattaaccttgaggtacgcggcccacacgaggttgcacgcccggcttcgtcatggtcggtttgataacgaagaatcgcgccatagcgatcttccggtaattccagaccaagatattgcaacccgccaagagtgtgcagagaacctaccgcttcgacataagcggtgtcgtgatccatcgccccaccgctcgccagtgcctctgccagtttggtgaagttgtcgccgttgcccgcggtagcggcggtaaacagtgtttgtttatcagagccagaacatgccgacgtccccatatataacccggcggtggcgattaacacattttgctggcggcgtttaagttccacagctgcacgtagccctgctgcaccactgccgactaccagggcatctgttttccagagtgggtaatcaacaccgtctaccgtgacaacccatgcgggttctgcctgtgcaaaaccctttgggaaagtaacgtgtgtcagtgcatcaaggatggcctcatcaagctggctcatgcatcctccatcggcgtaaacaggctactttccatcaggcgtgggtgcttgataattggacggaaggccatgaatggcagaatgtcgcgctcaatctctacgccaggggcgatctcaattaattcaacgccttctgccgttaactggaataccgcacgttcggtgatatacagcacttcctgaccgctttgctgtgcgtatgcggcgctaaaggtgattttttccaccagggtaaccagtttagggatttgacctgactgggcgatatgcaagccatctggcgttacatcaatcttgctgcctttggcgtcgaacgtaccgcaaaacaccactttacgggcgttttgtgcaatttcgagaaatccgccggggccaatgagattgccattaagatgggagacgttgacgttaccgtattgatccatctctcccatgccgaggaaggtgatatcgatgccgccgccactgtagaattcaaattgatcgagtgatggaataatggcatcggcgttacgggcgcagccgaacagagcatcatccagcatcatgccgttatgcacaccctgttctacactcagccacaaactttgataaggcacgccttcgcgcagcgcaaccccaggaataccgcccggaataccaaagccaaagttggttgaagcgcctgccaccagttcccgcgctgcccgacgggcaatcaggcgacgcaccggatgactaaccagttcaatagcgtcgttagaacttagacggcgatgttgaccgctgatggtcaggtcgtaaccgccaagataggtttgcggttgttcgcggtgctcaacgatgccatcgaccagaattcctggtagtttgacccgacgtggttcaatggtacctgcttccagcacatcgcggacctgtacgaacactttgccgccgctgttgtgtgctgccagcgccatcgaatagctatccatatcaatcgcctcttcttcgaggctgacgttgccacgcggatcggcataggtgccgcgcaaaatcgcgtagtccactttgaaagggcgataacgaagtttggtctcaccgtcgatttcaatcagttctaccaggtcgtcggtagtgcattcattcgacttaccgccaccattgcgtggatcaacaaacgatcccagcccaacgtgggtaaaaagccccggacgtccggcaccgatctcccgcagcagtgcctgaattacgccaccagggaaacagtaggcttcaatagcattgcttttcaccagttcctgcatcttgggcgaccaggtaaaatgtccggcaataatgcgtttgagcatttcggcgtgagcaaaacggttagtgcctttgctatcgcgatcgccaatacccagcgagtggattaatgtcagatcgcgcgggtgtccggtttgcagaaagcgcgcttcaatggcggccagaatatggtcagcttccaccatgccgccgccgttaccgctaatggcaatggttgcgccgtcctgaatttgcgccgccagtgtctcggcggttgataacttacgcatacaatttccttattgattgtggaagctcacgccggctttttcggcaaatgcgtgcgtcgcctgttggcaatcctgagtggcggacattaatccagccagtaactggtgggagtaatcggcgtgtttattttccagcgccagaatcagttgcttaatatgtgccagtgccaccggaccacatttttccagctgcgctaactggttcgccatccagctttccacctgttctttttctaccacttcatcaattaaattcgccgcctgagcttcctgcgccgtcaggcgtttacccagcatcagcatctggcgaccgaccaccgggccaacctgattaagcacgcgttcaatgcccatccagccaggcaccatgccgagcatcacttcaggattagagaattttgcgtgggggcgagcgatacgaatatcacagcacaaggcaagttcaataccgccaccgatggtatgaccgttgagattcgcaacggttaattggggtaagttgcgcaggcgattaaaaacgtcattaccgcgtttaatccattttctgcccatatctaatggcgaataggccgaccacgatttaatatcgccgcccgcacaaaagaatttatcgccggttgccgttaattcgactaagcgtaatgccgtgtcattttcaatttcatttaaataatggtcgagagattcgatcatttcttcattaatagcatgacatttatcttcacggttcaatgtcaggcggcaagaagccgccgctctgctgaacagaacgggttggtcactcatgattattccttaacaataatgtgcgatgcgatcgacgctaatatccagcgtgctgttaatatctttctgccaccagtacggtgagaatatttccagttcaatagcgccattaaatccggcgttttcaaccagccgacgaattgacggaatattgatgacaccatctcccggcattccacggtcattgaccagatcggtggtcggcactaaccagtcggaaacatgaaacgcgaggatgcgttttccggcacgcaggatctgactggcgagatccgggtcccaccagacatggtagacatctaccgccacgccgaggccaaattcgccatcgggatcgagttcatcacaccagtccagcgcctgacgtaacgtgcacaaacaggaacgatcggctgcggtcatcgggtgtagcggctccagcgcaatcggcacgccgacctctttcgaatgtggcagtaactggcgaatcccttgtttcacttgttcccgcgcttcatacagatcttttgttcccattggcagaccgccaaccacctgcatataacaggcggcgttcagtacagcggcgtcgtccagcgcccggcggttatcgtcaatcgccagtttgcggctccgccagcgtcggtgcggtgtagtaggtgctacggcacaaaccggaaacgtttatgttactggcagcaagctggcgggcgatktgctggagatcttcaccctgcaactccctgcgccagggggcaatggcgccaataccgcgtgcggcgcaggcatcaataatggcgggcagcggcgttttatagcccagtgtcgcggtattgatactgaataaatccgggcgttgtaacagatctctcatgattcagcctcagaagcgcggcatacttaagccgccgtcgatggcgaccgcctgaccacaggtgtaaatcagtttaccttccgccatcgcgcggacagtggaagcaatatcagccggataaccccaacgtccccacggcaccagacctttggcaatcagttcgtcgtaataggccgttgccggaatagtcatatcggttttgatgagaccaggacgcacttcataaacgccaatttgttcattacaaaggcgagcagcaaacagacgagcagcggcagagacggcagttttggcaatggtatattcgccgcgattcatcgccagcatgatggcgttgatggaactgacgaaaataatcgagcggtgcggcagttctgcttccggtttcggctgtgccagtaagcgcttactgaatgcctgagcgaggaagaacggtgcgcgggtgttaatggcaatattttggtcgaagctgtctggttcgaggtcgagaaggtcaccgcgttttttcactgaaatgcctgcgttgttgagcaggcagtccagacgtccccactggttttgcgctgcgtcgagcatctcttcatgcagggagagatcgcccacatcagcagggaagcaaatcacttccacgccttccgccagacattcttgttgtgtggcatgtaatttttctacgctatccgcatccggacgatcattaatcagcagattaaatccgccacgcgcaagctccagcgcacagccctttccaataccacgtgcggctccggtaatcacggcaacaggacgagtggatttcatacaatagctctctttttttgaattttgtttccttagtgatgattagcttgcgactggaggataaaaagatcaaccatctagttggttgatatgcgatggcgatcacaggacatttgataacctgatgaaagtacaagtttttgcccttttttctgaagctgaaatcaaatcaggttatgatagtcaccacgaagaggtcgtggggaagcgttatgtatcttgataccagcaacgtacagagcctgaaagaaaagctgctgttatgcgcggttaatgaatttgccgaatatggttacgaaggggccagagtcgataatatcgtcaaggccgcggggtgcagtaaacaaacggtttatcaccactttggtaataaagaaaatttatttatcgaagtactggaatatacctggaacgatattcgacaaaaagaaaaggcccttgatttctcagatcttcc

SEQ ID NO: 216 - DNA, 1927 bp, Escherichia coli
atccaccagcctgaatatattccgaatttgacgccattcttatcttttcttaaatgctgatttgttgcgcagtgttataaacacctggcacgctcaacaaggacgcgaccacaatgaaaaaatctcttctggctgtaatgctgacaggactgtttgctctcgtttctcttcccgctctgggaaatgtcaatctcgaacaattaaagcaaaaagctgaaagtggagaagctaaagcacagttggagctgggatatcgctattttcagggtaatgaaacgacaaaggatctcacccaggcgatggactggtttcgccgtgccgcagagcagggatacaccccggcagaatatgtactggggttacgctatatgaacggtgaaggtgtgccgcaagattatgctcaggcagttatctggtacaaaaaagcggcactgaaggggcttccgcaagcgcagcagaatctgggtgtaatgtaccatgaaggtaatggcgtgaaggttgataaagccgaatctgtgaaatggtttcgcctggcagcagagcaaggtcgtgacagcggccagcaaagtatgggagacgcatattttgaaggcgatggtgtgacgcgggattacgttatggcacgtgagtggtatagcaaagcagcggaacaaggtaacgtctggtcctgtaaccagcttggttatatgtattccagaggtttaggcgttgaaagaaacgatgccatatcggcacaatggtatcgaaaatcagcgacatcaggcgacgagttggggcagcttcatttagccgatatgtactatttcggtatcggtgttactcaggattacactcagtcacgggtattattttcccagtcggcagagcagggaaattctattgcgcagtttcgtctgggatatatattggagcaaggtttagcgggagcgaaagagccgttaaaagcactggagtggtaccgtaaatcggcagaacagggaaattccgatggtcagtattatttggctcatctgtatgataaaaggcgcagaaggtgtagcaaaaaatcgagaacaagccatctcctggtacacgaaatcggcagaacagggggatgctaccgcacaggctaatctcggcgctatttacttcagacttggttcagaagaagaacataaaaaggcgggtggaatggtttcgcaaggccgccgcaaagggtgagaaagcggcgcaatttaatttgggtaatgctttactccagggaaaaggtgttaaaaaagatgagcaacaggccgcaatctggatgcgaaaagccgcagagcaaggattaagtgcagcgcaggtacaattaggtgaaatctattattatggcttgggcgtagaacgtgattatgtgcaggcctgggcgtggttcgataccgcatcgaccaatgatatgaatctttttggtacagaaaaccgcaacattacagagaaaaaactgacagccaaacaactgcaacaggctgaattattatcgcaacaatatatagaaaaatatgccccggaagcctgggcgagaatgcaaaagcttaaagcgcaatcagcggtaaagacgggtaataaataacgggtaactgtcagatcaggtctgcgctaatacagctcaaccaatgccacctgcgggtggcgttatttttttgcgagacgacgcgtattcttttttgtaacttcctcgccttttgcttttccttccgagccgctttccatatccgttaacgcatgtaaaactctgctggcgttaacaaatgtgcaggggtaaaacgggggcacgctttgaacggtgagtatgagtgaggccggctaacttccagcaagtggctatgaacagcaaaatggtggtcgagtttagcttgttcttaccgttcaagcctttaaactgctgaaaataataatagtggagtagaga

SEQ ID NO: 217 - DNA, 6425 bp, Escherichia coli
ttttaataagtaattaatttgcttgtgcaccagggctgtacgctttaccacacgtggtgcgacccaaacgatattgctgccagcaatcacgccaagaatttctggcaaagcatggaaatcaaggattcgcgctactgcccgaccatatccggcgacggtatggataaggataaattcaccattatgctcgacactcaggaccatttcagcgacggatcgacctgcgtcaggtgtgggaagtaattgaggattcaccgaataaattttttgtccttttgtatttctaatttttatgactcccagcaatttcagtagtcgtgaaacggttgactgactgatactgtcaaagccatggttttgcaaatcgcggcggatttcctcctgtgaaagataacttttttcggtaatcaggcgctgacagaccgccagttgcttcttttctttggcggagtaatcatcgtattccttcataatgcaccttttatttattattacctgatgatatttttcacattttataatgtgagagtggttcatttatcactacaccagatttgaaggccgctttgataagcggcctgtcgcgttaaatcatcgcggcgatactcagcacaatcatattcaacatcgtgagaatcagcagtagcggtgctacccatctcagataacggacccagggtacacgggcaatcgccagaccgcccatcactaccgcagaggttggcgtaatcaaattaaccaccccggaagcagactgataagcggtcaccaccagatcgcgttgtacatgagcaaaatcagcgagtggagccattattggcatcgttaacactgcaaggccggaagatgagggaaccagaaaagagagcaatacttccagccaataggtcacgttgatgaaaacagtggtggaaagccctgaaaccagattctcagcactgtgcagaattgtgtgcgtaatcatgccgttatccatcacgaccacaataccgcgggcgatgccgataatcagtgccacaccaaggagatcccgcgcgccgtcaataaaggtactggtgaaggtttcttcgcccatgcgggcaatgacacccacgatgaccgcagctgccagaaagacagcagagatttccgccatccaccaacccagtaccgctacgccgtaaatcataaaggcaaaggatgcagcaaaaagtatcaggatcgctttgcgcgtgggggtaaattccagcatcgtttctgaacgatttcccagaaaatgcgcctggttttcagccatcttatccgccacgatagagctttccggactgttgcgaactttgcgggcataacgcataacccagtaaacacaaatcacgtagcctactaacagcaaaataacacgcagcaaaatgccctgagtaaaggggatccctgcggcgttggcagcaatgacggtagcaaatgggttaatggttgagcccagcgtgccaatgcccgatcccaataacactgtggcggcagcgaccagaggatcaaagcgggcagccatcatgacgggcaccagcaacgtgtagaaggggagtgattcttccgccatcccataaatagtaccgccagcagcgaagagcgccatcaggatcggaatcatccactcttcccgaccattaaggcgagttgtcactcgttcgataccggcatctattgccccggttttatttactactcccaaaaatccaccgatgatcaggacaaacagcgcgacatcaatcgctcccgcagtgtaggtttgatggttgtacaagccgtcgatgggcgctaacaggacagccgtaataccctgtggttgtgcctcaacaggtgcgtaagtacctgcaacaggaacttcctttcccagtgcggcatttgtcaccatctgatattttcccgcaggtacaatccaggtcattgccgcaactaacgcaatcagcacgaacaagatggtataagcggtgggaaatttgaatttacccataatgtgatctccataatcacgggcatacgccactcgtcgacgcatgcccgtcagggttagtcgccgagagttgctaccatcaccgctttaatggtgtgcatccggttttctgcttcatcgaaaacaatagagtgggccgattcaaaaacctcttcagtaacttccagtcctttgaggccgtaggccatctcgatctcgcgtcctactgtggtgtgctcattatggaaggcgggcaggcagtgcataaatttaacttcagggttacgcgtggcagtaatcacctgttgattgatctgataaggtgccatcagactcactcgttctgcccaggcttcttttggctctcccatcgaaacccaaacatccgtatagagaaaatcaacgtcgtatacgccttcttccacatcctctgtcagggtgattctcgccccagtcacgctggcgatctcacggcattgtgttaccagcgcttcatctggccagaaagatttaggtgccaccagacggatatccatccccatttttgcagcaccaaccatcagcgagttccccatgttatttcgggcatcaccaagatacgcaaagctcagctctggcagcgttttgcctggcgcatgttccagcatggtcattaaatccgcgaggatctgtgtcgggtgaaattcattggtcagtccgttccataccggaacaccagcgaactcacctaattcttcaacgatattctgaccataaccgcgatactcaataccgtcatacatgcgtccgagtacgcgagcggtatctttcattgattctttatggccgatttgtgagccgctggggccgatgtaagtcacctgcgcaccttgatcaaaggccgcgacttcaaaggcacagcgggtacgggtagaggatttttcaaaaatcaacgcaatgtttttaccgaccagcgtttgtttttcgtttccagatttcttggcggctttaagattgatagccaaatcaatcaggtattgaatctctgctggggtgtaatcaagcagcttaagaaaattacggtttttcagtgaagtagccatggggatgtccttataaaaatggatcaagcgtggttatggggggtatcaaggcgaataagagtgcctttgtctccggcgagaatttccggaccatctgcaagagagccgatccctgcaatgccccggcactgactaacaaactttgcgcaggcggtgactttcggccccatagacccggcatcaaactgcatttcgttgagtaattccggcgtgacctgtgccagcgggcgttgggttggcttgccccagtcgagatatactgcgtccgcatcagtgaggatcaacaaggcgtcagcatggatctgacttgccagtagcgcggctgaaagatctttgtcgataaccgcttcaatcccatggtatccatcggctttttcaaccaccggaacaccaccgccaccattacagatcaccagatgatcgtgggcgatcagtgtctggatggcatcccgctcgacgatgcgtttaggttgtggagaaggtacgacccggcggaaagagtgaccatctgctttgaaaacccagcctttttctgcctgtagtacctgagtctgagcgtggtcataaattgggccgatgtacttagttgggttactgaaggcgggatcgttggcatccacttcaacctgcgtcagcagcacgctgatttcacgttgtggtagttgatttttcagcgcctgttgtagcatgtagccgatcatcccctggctttcggcccccagaatgtcgagtggatagggagcgacatgggcataggcgctattttgaagtgccagaagtccaacttgtgggccattcccgtgaaccagtacaacccgccagtgttgagtcagttgggcgatagttttagccgcaagatcgatatttttacgttggatttctgcttcgagtggttcgcctcgtttaagcagggcattaccgccgagagcgataaccagtgttggtttgttttccatgatctcttccttagataccgtcacgatgcaaagggcaactcatgcaacgtgcgccgccacgtccgcggcctaattcatcaccggggatgggtaaaacggtgatgcctgctttgtcatatttttcgttagtccagatgttgcgctcgtagcccactaccactcccggccgaagcgtgagcacattgttagcgtcattccactgttcgcgttctgcctcaaaggcatcaccccccgtggtgattaaacgtacctggtcaataccgagggctttttcgatagcatggaggagtgtgctttcttgagtacgtttcaggccgccgtgaccgtcaggtgttagcgtccagcaattaacatccgggcgcacaacttcgggataaaccgagaaggtgtcgatatcgatatgagtcataacggtgtcaagatgcatacaggagcggtgtttaggcagctcaacagcgattacccgttcagcctgacgatgtttaaacaatgcctgagcaagaaactcgattccttgtggcgtggtgcgttcagacatgccgatcaacacggccccccgaccaatcaccagcacatcaccaccttctaacgtggcgtggtcataattaatattctcgtcgccgaaatatttaataaattcgccgccagcaaattgtggatgccagcgataaatagcgcgtagattattggtttcacgttggcgagcaggttttgccattggattaatcgatacaccgttataaatccagcatgaggtatcacgcgtaaataaatgattcggtaacggcttcataatgaaatcattaatatcgtgggtatcaaccaccatatttttaattgaggcgggaatttcactataagtcagcccaccacttaaatgacgagcaaggtcccggtgtgacatctctgcaagccaggtgcgaacgtcagtagcaaacgtagggccgagtcggtaatctgatatttgtgtttccagtaaccagcttttggcttccgggatatccaatgtttgtgttagtaaatcagtgagtaacagaacttctatcccttgctggcgcagcgtattggcgaaaatatcatgctcttcacctgcccgctcaacggacaatacatcgtcaaataacaactcctggcaattggatggtgttagacgtttcagactgagatttgggcgatgcaacataacgctgcgtagttgtccaatttcagaaccaacataatgcttttccatcattattcctttaacactttttcaaaaataaagaggagatggctgcaaacaaattaaatgcttgtagtcaggtctgttcagtaattttcagatgcaatgattcagtttatttcttccagaaaatgtgacgactttcacaccggcggtgatattaataatcgaagttaataatatttgatgcggttctgataaatgataaagaaacaaaatacgataatgcattaatacgcaaatatacgcatagttattcttcgttgttaattgattgttttatttttcaggaaatgcctttaagtataatgcattgatatttatgtatattttaatattcattgcatatctatgcgaaaggataaggtgattatttttcacagcactattttcacgggataactatgacagcacgggcattaaaagctaagaaaatgaactgtgatctgactgagagttttcttttaacatatgcaataacaagatattaggaccaaaatacatagctaagttataagatttatgcagcaaaactgcatacaaaattactcctgcttaacatcagtacaacatctccagcaataaacatgcgcaagggcaaaacctgatgatttttctatggtgagaggtggctttttttcgtataaggaaagaagtgaaacattgttttaataaaggaagatattatgattgttggcaacatccatcacttacaatcctggctgccggaagaacttcgcgaagcaattgagtacatcaaatcacatgtcagcgatgagacagcaaaaggtaagcacgctattgacggcgaccgcctgttttatctgatttctgaggatacgactgaaccaggtgaactgcgtcgtgctgagtatcatgctcgttatctcgatatccagattgtattaaaagggcaggaagggatgacatttagcacgcaaccagcaggcgtaccagagactgactggctggcagataaagatattgcttttatcgggcaggggatcgatgaaaaaacagtgattcttaatgaaggggattttgtcgttttctatcctggcgaagttcacaaaccgctttgtgcggtgggagcccccgctcaggtacggaaagcagtagttaagctattaaaatcgtaagtgatcactgccgggggcgacctgtgccgccgcccggcaaaacgttattttgctaat

SEQ ID NO: 218 - DNA, 1144 bp, Escherichia coli
aggattatcggcgacggtaagtttgcgcaaacggagtgcgggagaagcgacaacattcatagcatagctcaatttcaaatgtatgatttatagctcactttaataccaccctcgcttaggtggtgcaagaagaagataaatcagaaaatattacgcatatctctctgagataaagcgtattctaggcgaaccagtatcaattgactggaattattatcggtatgaatggaatttattttagggatatagttcatgaatgatgtaaacatcgggaaagataattctcggcactcgtttgttttcacaggcaaaggtggtgagtattttcttatttgtcttgtgaattttttactgacaattattactctgggaatatatggaccgtgggcattgataaaatgccgtcgttatatttatcaacatgtgacactcaaggggcaaccatttagttataagggaacaggtggtgccatttttgttagcatgttacttattgtggtggtttatcttctcagtatttcttgttttgcaggtcaacactttgcgctcggtttattcctgtttgctctcttgatctgcggtattccttgtatggcagtgaagagtctgcagtatcaggcgaacatgacctcactgaatgacattcgctttggctttaactgctcaatgatgcgtgcatggtggggttatgctaggactgcctgttctgttggcgttagttttttggttcgcactgtatcttattgcgcaagtgacgacatcgataggaggcttattctttaacttagtcgcattaagtttgctttctgccatcgggctaggtgttgtccatggtataacctatagtaaatggatgccattgctgggtaataatgcaacttttggcattcataagttttctattcaggtaaacgtaaaagaatgcattaaaggttgcatgctcgcaatattaaccatggttcctttcatcattgtgattggtattatgatcgcaccagtattccagcagttaatgatgatgaccatgttgggtgggtctgatgctggcagtgagtttgtattacaatattacccgcagattatggcttcttatttcctgtattttgtcgcgatccttgtttttgccagttatctctatgtcacg

SEQ ID NO: 219 - DNA, 102 bp, Escherichia coli
ccgcgtcttatcaggcctacaagttaagtgctgtgtgtaggtcggataaggcgttcacgtcgcatccgacaataacagccttgcctgatgcgacgctgtcgc

SEQ ID NO: 220 - DNA, 14518 bp, Escherichia coli
  misc_feature (10814)..(10814): Unsure
  misc_feature (10834)..(10834): Unsure
ctggatgccaatcgggagaaaaccgtttcactattcgattatgcaaagctcaacaacccaatgaagtaaaatacagcatacaccccagccgacctttataatggtaggctgggtttaatcttacttcaccacttccatcagcttactgaagctatccactacgtcatacttcacgttttctggagcaaacgtcttgttaaccgcatcgaagaacttacgggcacatttaatcttggtggcttcaataggccgtaaatccagtgacgacatcgagcccttggtctcagcaacgaaatacacatgcttgaccgagccttctttgaaggaaatagcccagtcggggttgtaatcgccgacaggggttgggatcagaaaaccacgtggcaacttggcatataccaccacatccttgctggtatccaactcttcgacgaacttgcgctcaattgcagagtcggtaagcacgtaatcatagatgtgattttgcaatttattcccagccttactgagatcctgtttgctctgacccgtggtaaagatgtccaaatcaaacttgtcttctagcgtgtcataggccagatgctcgatgatgacattggccttttgttcgttgaccaagcgaatgacttcggcaatgaaactttccgggttgctcttgaattgcgcgaagacgtcagcatggagaccttttagaatttcggcaatggttcgtcttgtaagcaaagtcccctctgataacttaccaatcaagtcgtactgcacagcggagtggatagaggcggtgtgcgattctgtttcggtaactttcagctcgaaggcgataccctttttgaggtcatcgtaagttgccgtatcagcctgcttgccacggtgaatggtgtattgtaacggcgttactcgtaacccagcattcttatcattgagcgccttgatcgcattgttcactagctcaacatcatcaaacagtacgctgtaggtagctttgcgattgattcgcccccacagcgctttgaactcctgcttttcaaagttggcgttggtctgcagtcttttgggcttgcgtccatcttctacctgcatgagctggctttcgctgaatacgctgttaatcagctggaatacctgctctgcatagggctgcagctcgtccggcaatgcctctaatgtgccgtctttcttagcttggtggtatttctctgtgatattgcgcttcttatcgacgtagccattctggatcagataaaactcgatgtccgtggcttggtcgtccgagaccgtaatcgggccttccttcgtgttcagcatcttgcccgtgaagtaggccttgtccgccacacgcgggcgagcagacaaggagtcgctaatgtccttctgcaaggcggtcacgaagtccttgtaactttcgctggccacaactgtcagtacgttaatgtcatgaacaatggatgggtgatccatgcgttcaccattttgattgacggacaaacgcaggccgcgcccgacctcttggcggcgtgaaatggtgttatcactatgcttgagtgtgcagataacaaacacgttggggttatcccagccctcacgtaaggccgagtgtgagaagataaaacgcaccggctcagctagtgataataaccgttccttgtctttgaggattagatcataagcatctacgtcatccgacaagcccgcattttcaccgcgcgcagcggctttgggatctgtgaggcgcttgctcttcttgtcgatggaaaagtagccgctatgcgtcttatcggccgcaatgcggcgtagatatttagcataaggggcatccccctccataaacccattatcaaacacttcttgaatgtgcttagcgtactcctcttcaaatatttttgcgtactctcccttttcatcgacagcggagtagtcccggtacctggccacttcgtcaataaagaacaacgagagaaccttcacccctttatcgaagagctccatctccttatcaaagtgcgccttgatcgtctcacggatctgaatgcggcgcagcgctatctcggaaatatcaccaatcacatcacccaccgtcagttctacgccattggtaaagctcaaggtgtccgtattggcattgatgtccgataccacaaacccatcgcggtattgatccagctcgttcgatagcacaaacagattgtcacccttacccagtttgcgagtgacgcgcttgatgtttccaccgctgagtttctgttcgaactctacaaccgctactggcggttttttgtttgagatttcgatggattgtaaatagagataggcattggttcccgccagtcccttcaccgagataccacgcacctcaatcttcttcaccagcttctggttgtaggcatcgagcgcatctaggcggtgaattttgttgtgtgtggtcttgtgtgtagcggaatagcgcaacaccatcaacgggttgaaattagccaaggaatctagggtcttgcccccctccatccgctgcggctcatcgaggatcaagatgggtcggtttgcgctgatcacatcgatcgggcgacgtgactgaaaatcatcgagcgcttcatagatacggcggttatctttgccagtggcgttaaacgcttgtacgttgatcaccatgacattgataccggcatctgaggagaaactctccagatggtgcagctgcttagagttgtaaataaagaagcgtgccttcttgtgataggtctcctgaaagtgctcggccgtgatttccaacgacttggctacgccctcgcggatggcaatgctcggcaccactatgacgaacttgctccagccgtactgtttgttcagttcgaagactgtcttgatgtagcaataggtcttgccagtacccgtttccatctcgatatcaagatttagcttggcgaccttggtcttgaccaagctctccgacaacggcagattttgctggcgctgcacctgctggatgttatcaagcaatgcaacctcactaagggttagctcagcatttttaaaaccagtatctaccgcaaacagatcacccataccgtttttggtattaccagggtcaaggcgatagctcatggccgcatcagaggccggtggctgcccctgaaaaatatcgacgaccgcctgcactgcggcagcctgatagggttgatgtttgaatttaagcttcattgcaccgtccccctcagatacattttacttcggtgacaggcgacatgagcttgaaaatctgctcgacattgatcttgaccgcactgttcttaaagcccgcgtcgcggaacacaacgcgcagcggctgcagtttggccagttccttcacgaaggtttcgtcaatgctgccactggcgtcgaagcaggcggtaagcacattgccatcgacaaagaacacgtctttaccttggatggactgcttggcgataggcagggccagatcgacgccccaatccagcattacttggaacagcagatcctcaggcgtgcgatcaggcttgatgttgtcaacaaacaagtcgagattggctttttccagcacatcggggctgtagtagacgtcagccatgttcgatgtatcgactttaagcaggcgaaatcctaagtcaagttccgtatttcttgtagccaatatttctgaaaattcttctctaattttttttgcagctctccgaatgcgattttttccaatctccgaaactactgagtatccaagttttttggcttcagacttctcgtcacattcctcgggcaattgaaccattatgaatcgacgatttgccccatcttccgcattcaaaagcataagtgcatgcgccgccgtgcacgagccagcgaagaagtcgatcaatatatcgtcattcttgcaaattgattgaattagtctctttgctacctgaaccggtttcggtgtatcaaaaggaattttaaggtcagcaagcaaagcgtcgtcactgccaccgtaataaagtagagaagggatattttcgaataaattgtcattcagccgatattttcttgttggctgcgtcttctcgtctggaccgaaaataatcaaccctgacttcaagagttcttgcattgttgcaggagggtttcgccacccacgctcaggaacagggcactccttccctgttacaggatgaattagcggaatgaaataatcttccggtgcttttttcttattcggccacgccatagaaaccggacggaagacgtcgccattgtcatcgatttgattatatgccttttcccccccagttagatcttgctggtttacccaatctttgtattctttccttgctttttcagttaccccgccctccttgctaagaatctgcttggcttttgcaagcatttttcctgcattctcttttggtcgctggaactcgcaggttgtcttgaagaattctcgatctttgcagtaaatacaaattagctcatgctgctgcgcgacacctgtggcatcaccttttggatttctcttatcccacacaatagttccgagattattcttctcaccatatatttctgccagaagcttctccaggttgggatattcattctcatcaatatgaattacgattaatccatcatctcgtagcaagttgcgcgataactttagtctcgaatacatcatggacagccagtctgagtgaaagcgcccgcttgtttcggggttggctgttaagcggtttccttctctatccacctgatttgaacgaagaaaaaactcagagacctcgtctacaaaatcgtcggcgtaaacaaaatcgtttcccgtgttgtacggcgggtcgatatagaccatcttgattttgccaagataattttcctgaagcagcttcagcgcgtcgagattatctccctcgataaagatattcttggtagtgtcgaagttgacgctctcttcaatgtgttcgccttttgaattttttgtcgtacgtactggacggagcgtctttgcaatcggtgcatttgcagtgagcagtgcctcgcgcttaccaggccaattcagctggtagcgttcctgcggcccttctacaatcgaatcagacagttcctggcgcaattggtcaaaatccactgccagcttcacgctaccatcctcgcccttagcttcggtgacgcagcctggaaacagatcgcgaatgcgagcgatgttgtcctgcgtgagattgggtgaatgcatttttagcttttccatattcttttcctctggccggtatgctgcttattgaaaaggcatagccggctcacaattcaagttcgtattggtatggttagttgccttgctgccagtcctggcaaaagtgcaggcgcaggctctcgagtgcagatggcaagctgccctagcaggtcacgtccaggtaggttgccgcacgggtgatgcctgacgtacaggtatttatcgaacagcgccgggtgcagagtggcgagctggtcaatgctgacaaagaacaccgcctcgaactccatgcctttgatgtgctggatgtcgaacacgcgcacgttactttctcttctccctcttcatcgtctaccacaacacgagcaatggcaggctccgccaccagtacctgatggttttcgcggttcgcctgactgatcttacccagcctttggatggctgaactggacgtcattgcgttgatgcttgccagcgcatcggaaccaagtgtccgcccatcgtacagcttgcccctttcggtttcagcgatgctttcgagttgcgccaatgcttcaccagcgatctcctcgatatgtttccttgactcgtcatttaggctctgcgtcatgcattctctctccctgtcaattcttcaagttcgtttttaagctgtcgcaattgcgcgttgatctctactttgcggttaaattgtttttctttggcaagtctactggcagctttctcaacctcacgctgcttggctgcaaccatttcgacacgtgcgaccaagtccgcgagactttcttgtgggcgcgcgggcatggggatcaggcggtgaagcacctgctcatacaagccgcctagatcgagtgctaagggtattgcggcacgctcactgtcactcggcaaccaggctgtcgcaaagtagctactcaagacccaacgactggcgtctgactcattggggcgtttgtatgcagcgatcacctttgttcggccatcaaagctcagctcgaatatgatgggaaactgcactgcgccatcgatacaatgtaaaacgtccagattcagctccgatgtcttgagctggatcgagaaaatctgaagctctggtactcccggcctagcgggcaggttaatcgtttctggggccaacttgtatcgccagacgatcagctccacctgctcgatgaacaagtccttcagccttgtattggcgccgctatgttcgtagatcttattctttggcagggtacgaccaaaggcggcctgcttcgggtagtttatcaacgcgatattcgactcaaattggataggctgactcatccggcctcctgaatcactaggaaggtgatcaattcgaagtcgtctagcccgacgatagtattgaccagcgcggtagtcttaccggcgaagaagaggctgtccagatccttctcttccttcacttcgatcattgagcggatagctttgccaagcagatctgaatacacttgcatcttgctgccatcggccgtttccttgttgaacaagagacaggcgtctgtaataggctgggtttgccccttgcagcagctacgtaccagatccagcaagcgtttgacctccgtgtgatcgtgaatgacttcaccctcgcgattaatgtagacgaggtaataagggtgtagccggttgtgctgactgacgttgacgcttggattccggttgcgcagcgtgaagatcacacccgggcgcaggcccatctccggcttggcagacactacggcgtgcattccgtttggcacgttgctcaattcgccattagccttcacatagttgagcaaatccattcggaagtcattgagcccgagatcagtgatcgacactccggttttcaggtcttccagctcaatcacttcctcttgcaaacgtcgcaattgctctttgcgataagacacgtcgttggcttgggcgctcagcacattgtcgtcaccggtggctgtgacatcagcaatcatcatccggctctcaacccgttccttgaggttgatgtattcgtcgagagagatgtctggccagtagttaaccagttggatgctgctgttgggtgaaccgatgcgatccacacggccgaagcgctggatgatgcgcacgggattccagtggatgtcgtagttgatgaggtagtcgcagtcctgcaggttctgaccttcagagatacaatcggtgccgatcaacaagtctatctctgccgcctcatttggcagcacgatggctttctccttcgagtgtggtgagaaaagggtgagcagttcttggaagtcatagctcttcttaagcgtgctcttcggcacccctttgccagtgacttttgcactgtgcaaggtttgtgtggccagcaattccggagccaaattggcatataggtagtcagcggtgtcggcgaaggctgtgaagatcagcaccttcttgtttccaggattcagcggtgctgcgactttttcctgaaccagtgctttgagatgctgtagtttggcatcatcggcagccgtgatcttgttcatcgacgtcagtaaggcatcaatgatttccagatcaatcttcaggtcgtgctcccaagaaggcaagtccatatctgcgaggctgattttgaccttgccaccgatctcgctgtcaccgatgcagggcaggtcgtcgtccgcatctaggttttctaactggtcggtgaggtcattgattctactgtcaatgccactgaggtcgctagtctcattgaaagtgctgatcttggccagcgtattcatgtggttcgcgcgcagggacttgagcgtcaagcggaaggactcaatcgaactttccagacgcttgagcaggttggtcgtcatcaatgcctgcaggctcttttcgcggtcgacttgtttaagcttgcctttccctgcaacctgagtgtcatacatctcttcgtacttcttgagtcgactgggcaggatgtagctgattggggcgtaaacagcgagcttgagtaaagagagccgctcgaaaatttcgttaaaactcatcacatccgttcgctgcgtgagcgagcagtggaacgacaagggtttgcggcgctcagggaattggccgatttccttggtatcgtagaaggtctgaatatgcttgcgcgaacgtgcgatggtgacgctgtcgagcaattcgaagaagtcgaagtccaacgaatctaggatcgcccgcgctgtgcgatcttccgatggaagctttgcccatgcattgaagctagcctgtgcgccacggaaaatgtcctctaccgtcttgccagtacgcagcttcttgctgaggttttcggaatcgccttcgtaggccaacgccagttggtttcgcaggtcgttgaagcggttgttcaccggggtggccgaaagcatcagcaccttggttttcacgccctccttgataaccttgttcatcagcttttggtagcgggtttccttgtccttataagcatcattgttgcggaagttgtgcgactcgtcgatgataacaaggtcatagttaccccagttgatgcgattcagcggtgtgccgaacgactcaccgctcgtacggctgaggtcggtatgacaaagcacgtcgtagttgaaccggtcgcgagcaaatatgttggtcttgaggttacggctgtagttcagccagttgtccgccagcttcttggggcataacaccagaactgacttgttgcgcagttcgtaatactttatcacggccagcgcggtgaaagtcttacccaagcccacgctgtcggccaagatgcaaccgttgtagctctcaagtttgttgatgatcccggtggcagcatctttctggtaattgaagagtttgttccagatgagtgtgtcttgatagcccgtgcggtcgttcggcagagcatcctcgttaatgtcgtccagaaactcattgaagatattgtagagcatcaggaagtagatgctctcgggcgagttttcttggtagacggacgtaatgtggtcgcagatctgtgccgttacatcctccagcttctcggggtcttgccagatctggttaaacagactgaggtaggtcgccgtaaacgtcgactcgtccattttgttgacgaggtttgagacagcattgccctgctggtagccaagatcgacggcggtaaatccgtgcagtggcatgtaggcagtctctgtggcggcggcctgaacacaagcaaactgctgcatcggagccttgctgcgattggacttgaatgttgccttgcgccgcatccagtccgcgcactcttttgcaattgcgcgctgggtcagtttgttacgcagctgaatttcgaactcactcccgtacaagctccgttcgcggtcagccttcagtatgtggaattctttgcgttccttgcgaatcttgtcggtaacctcgttagcggtaaacgtcggcgaggtaaagatgaattgcagctcgtcgattttttccagctctgctttgagcgcttcgaacgcgtatatcgaaaagcaggaggcagcgatcttcaggcgagcactaggtttgagcgtctgctttaggtcgtctccgagcaggcggttgatattgtcgatcagttccattaatagtcagccttcttagtggctctatagcctggtgccagtaaggcattttttacgccgtaaattgcgagatgatctttgagccataaccggtactccggtccacgaaggcaatgatcaggtgagcagtctacccgccagcgctgcaacatatagcccaccaccgcagcgcgaacgcgcattctgatcgaaccatctgtcatcccgtagtccatcttgataatatcgggtcgctcaacgctcgggtgcggcacgaaatccagctcgacgatgcgcgtccactggatatcattatgcggtcgttcgttggcctgtggctcctcgtcgagcaatgttggttcttcgatgcgggtgacgacgaaatcccgaaactctctactcttgcgatcaaaggcccgtacgtgccagcgcaggccggtatcaaccaaggcaaagggcacaattacccgcttggactcgccgctgctcatcgagtggtagcggatggcgacgggtcgcttagcgtggattcctcggcaaatcgtggctaacacatccattttgggaatgcttagggctgcgggggattcgcatggtagcagtgcctgcattgagccattcactccatcgccaaaaccgagagacagcgccgacagaatgcgcagcgatgcgtgctcgaataacggggagaactcctgaccgatgcgatagatcttgttgctaccatcgaaggtgatgttatgcggcacaatttcccggtataaagccaaatcgcgagtcgcccctgccggagccacaccgaagcgctcaatcagatctgggcgaccgatctcaccgaagaagtagagccgaaaatcgatgtaggccagccgatcgcgctggaccagactcaagtcttcaagccgcttaggaggggaactagacatgaataatcactatataggaaaatgaaaattgaatacggtaatccataaagagccatggttgtaatcaaattgatgacaatcatgcattaatacttatggtaacagcaagaaatgatgtcttaaacngtagacaataattcgtattnggccgtgtttctatgattgtaaaagctaaagtaatcccgtgaagagcctctgtatgggaagctttttacaccaaagtgacccgtcctgaatagcgttgacatataacgttttgcggttttaggagaagatgcttgtaaaatgttgtggccaacaatttgctcttgccatgtctgttcatcgggatcggttagcaacagttcggcaatgacgcggctttccctgctcatgagcggcccgcccagcaagtctcctacccatgccttgtcatttttaatcatcgaaaaaccctctgaagactggaatgcagctcgcaaaaaacaaaaagtgattgtaatgggggaccgggcgagatgccatgagaaaaggcaatttgtgagagggatgatcgcgttatgtacaacacataaacggttttggcgagagtcatgctttagccatttctataagtgagactggaaatgaccctatatcattcccattaaatgcatcagcttaatcgattacagctcaggaaataaaatttttactgtgttaaagtccctgtaaaatcagttaaaaaaggaagataaacgtggcgctgtacaatattgcaaataaagaactacatgctttagaaaaaacgacatttactctggaaggattacaggaacgttatgatttacaggaagcaatcaaaaaaaacatagatattattgctcctgattgtctggtgatttctgaagagttttcttactgggaagatagccgtcggcgaattgatttattggcaatcgataaacaggcaaatttagtggttatcgaattaaaacgtgatgaaacgggggcgcatatggagttacaggcactacgatatgcggcgatgatttccacaatgagttttgcgaaagcatgtgaatatttccagacgtatttgaaaaaacaaaactgcgatgccgatgcgaaagaaaaaatacttgaatttgttgagttggatgaaactgagcttgttgattttggtaaagatatcagaatcgttttggcttcatcggattttagtaaggaactgactaccactgcgatttggttaagagataagggggtagacattcgatgcgttcgtctgacgccttatagatttaatgatgatgttcttatcaatgcagagcaaatcataccggttcctgaattggaagaatatcaagttaaatttcgtgaaaaacgtgatgagcagctaattagcagtcagaaaaaagagaaggactatacgtggtatatatactcaataaacctcaagatgcgggtgtgagcacctgaaagtgatcgttaattcgggatgtcagtgagtccgctatatccggcagtgtctggttaaaaaagacagatattgcttccctgaactctcgcgtactgctgaagtagcgattattccgggcatgttcgttcattaatttccacattctttctatcggattcaggtttggactgtaagggggaaggtaatgcagcctgatatttaccacttccgcccagtctttcactaactgtgaacggtggtaacctgctccatccagaataacgtggattttctggttataatcaggataaacctttcgtatctcattgaaaaaacgggatacattatattcattaatggttttatattcgcagattagcggtgacgtcagtgctttcagattcagcgcccccatgatattcaggcgtgtgcggctgcctgttgtttttactgcttttttctggcctttgcgtatccagccatagctgattttagtggcctgagtcggatggactccatcaataaaaagaatcggctcatcacccacagttgttttcagttccttataatattcaatgaattgcctttgtttctcttcactgaatttatgggggacgcctgacggttttttgtaggtgaaaccattacgatgcagccacttattcatccccggaatgctgaaaatgatgttccatgtccgggtgacaaacgcaataacatcgcgggtatggtgaaataaattatcggataactggctgatgaaaaggccgtttgttcagcactgagtttgctgtctgagccgccgttttcgggcttcagttttcctttattcaggaattcgctgatatggtgataaatcgttgtctgatgcaagcgtaaagcctgagcaatcatggcagaactccagccttcggaagccagaagaatggctttaatacgatctctgactcgcccgtcacgactggaatcatgaaggcgttcaagttcagctttttgttgctcagtaatgaatattttcatgttggacagcatgatcttctgttgctgaaaaatcaagcatcttcaatgatcacgggtatataagctatgaaaaacagtcttagccaataaggaatatctcaattattgaacataaaatgtgaattgtttagtgcaaaaaagcagcgttacgtgatctttccctgacagcagatcccggtgagcctgccaccatatcttcacaagcttatgcttattacatgcaaaacgtcccgttttgcatctttgtgcctacggcacacagtgatctttccctgcctctgtcatgacagaatcaagcatcttcaatgatgacgggtatatataaagataaagaacttaataagcgtaaattagcgcttgaattattacgtgattggataagacaatttaatccagcaagttataatgatttaataaatggattaagtgaagactttaaaaaacgtacggttatgcttgtcgatcagataccagagaagcaaaagagtcgctatcatatcaatgaagatgcattgattacacttccttctggtgaaattgttgctatttctaatcaatggggtattgctaatattgaactcttgattgagtttgtacggcaaaatggttttgttgttgaaaaagctgaacaataaattttgatattgctataaatgtctacattgaaaaatggggagaacatttgtagcttttaatatctcaatgcaagagatggcaatattatgggggcacggtattatcaaccttaccccctaaaaacctctttccgatgccactccacaaccccctcaaaagggtaattttttcgcacctgtagcaacgcaataatttttccgtcaaaatcccagaatgacctctcaatgatctctccgccgtttaccgcatccgataccagtacccgcagattttcatccaggccaatcgttcctttatcaaaggttttatgatgtatagcgcaaagcgccaggccattgggaatttcacaagggccaccatgctgtttccattttatatgtgtcgcttccagtgagacggtggagttgccgtaacaaatattaaagctacatattgcgcactggtagttataagcgcgtaatacatgtttgcgaaataatgggtcacgctgcttacggatttgctggagagtaaaaaaaggctcgtcagcgatttactggaatccattgatatccctggcagtgaaataattacgatcatgctcgcaaattttctgctgttcaagcctgcaagcgaagatatattaccttgatctcatatgtttttttacttcctgtgtgccctaattgccatgcgatgttgcaccgacgcaaaccaccgtttacgccggaggagttaaaagcgctgatggatgcgaataaatcaaattaatgaa

SEQ ID NO: 221 - DNA, 152 bp, Escherichia coli
tccctcatttctggtgcaaagtttaaccgctttgcactatgtatgttccctgaatagttaattatgttctgcagaatatattatgcgtaaattaatcattacgtacgatatattgttttggaataattatatatcagtttaacgctgagaaa

SEQ ID NO: 222 - DNA, 52 bp, Escherichia coli
ttttctgtacagtgttttatctttggcggatcttataaatcccttatgaaag

SEQ ID NO: 223 - DNA, 445 bp, Escherichia coli
atcgcacgatgccgcagtaaatgacgggaaacgcgatacgcgcaagacgtatcgcgttaggtcacaattagtgggaggttctgattgctgctttcaaggccggaagccgggacggactggcactgagcttatcaatccccatggtgagcagtcgtgctgtttgctggatatctccagccatttcgccgcacatactgaccggaatttcattattacgtccggcctgacacaccatagcaatagcgttaatcaccgcgtcattacaataatcgaccagtttcgcgacggtgctatttcctctgtctgccgccataatatattgcgtcagatcgttggtgccgatggaaaagaaatcgacttcactggctaatttgtctgcaatcatgactgcggcaggaacctcaatcataattcccagcgccggaagattttctgcagaaaactt

SEQ ID NO: 224 - DNA, 2408 bp, Escherichia coli
acgtggcgatgatagtgaccttcctgcaccaacgttgccgccgccatttatgtgaacggtacattaacgctgctggtggcagcaaatgcagacccggtgcgtgttacagcaggtgagagatgaacggttaaaggatattgggttatgcagggaggatgtggtgtaatggagagagtccttcacgaaacgatgggatttatatgtcacctcgtcagataaggggttattattgcgaaatcatcgcttcacggaaagacgtcagaatgaaagctacagaagcccgcctactcgattttttaaaacgttcgcagcagttcgttattcccatttatcaacggacttattcatggacagaacaacaatgtcggcaactttgggacgacatcattcgtgccggaaagcgtgacgatatatcagcgcattttatcggttcggttgtttatattgagcaggggttgtatcaggtttctggtatttctccgttactggtcattgatggtcaacaaaggctgacgaccgcaatgttgctgattgaggctttatcgcgtcatcttggcgaagacgaagtttttgatggcttttcagcaatgaaattgcgtaattattatttactcaatccttatgagtccggcgagaaaggatttaaattactgctgaccgagactgataaagacagtttgctggcgttaataaaacaaagaccaatgccagaaaactattcccatcgaataatggaaaactttactttctttgatgaacaaattgccaaactcggggatgacttgattcccttatgtcgtgggttagcaaagttattaattgtcgatgtggcgcttaatcgtggtcaggataatccgcaactgatttttgaaagtatgaactctaccggtaaggcgttaagtcaggccgatctggtgcgcaattttattctgatgggcctcgaaccagagcatcaaacccggttgtatgaagatcactggcgtccaatggaagtcgcttttggtcagcaaggttacagcgaatattttgacagttttatgcgtcattatctgacggtaaaaacgggggagatccctcggacagatgaagtctatgaggcatttaaactccatgcccgcagccagagtgttgctgaaaaaggcgtagatcggctggttgaagatattcacatctacgcggagtattactgtgcaatggcattgggaaaagaaagtgacaaatcgcttgccacggcttttcaggatttgcgcgagttaaaggtcgatgtggcgtatcctttcttactggcgctttatcatgactataaaaatggcgttttgtctcacgaggatttcctgagcataattcgtttaattgaatcttatgttttccgccgttcagtatgtgcgattccgacaaattctcttaacaagacgtttgccactttttataaggtcattaataaagaaaaatatctggaaagtattcaggtacattttttgaatctaccttcatatcgtcgtttccccaacgatgatgaatttaaacgggaattaaaagttcgcgatctctataacttccgtagtcgcagctactggttacgacgactggaaaacgataaacgcagagagcgcgtggaagagtttacgattgaacatattatgccgcagaacgaaaatttgtcggctaaatggcgcgaagagctgggaagcgactggcagctgtattcataaagaactgttgcatacgttggggaatctcactttaacgcgctataactcccgttacagtgacagacctttcgcagaaaaacgcgatattgaagacggctttaagcatagcccgctctatttgaatatcggtcttggacagtgcgaaaaatgggatgaagctgccattcacgcccgagccgatcgtctggccgatctcgcggttcaggtctggcaagcgccttctcttcctgaagaggttttagctgtttatcggggacagcctgagaacaaaaccagttacagcctgagtgattatccttttcttgctgatggttcgcatagccgggtgttattcgatcatcttcgcgatgaaattatgcgcctggacgcagggatcacgcaggaagtattgaagctctatattgcgtttaaagcggaaacgaattttgttgatgttgtgccgcaaaaaagccgactgcgattgtcgcttaatatgcagtttcatgaactggtcgatccgaaaggtattgccaaagatgtgacaaatgttgggcgatggggcaatggtgatgtggaaattggtttcagtgacctcgcacaacttccttacattatggggttaattcgtcaggcatttgaaaaacagatggagagcgcgttggtataacgcagcgaaaaatgcccggtagtcctggcgctaccgggtcaatgtatcag

SEQ ID NO: 225 - DNA, 7824 bp, Escherichia coli
aagatgaaaattagcgtgaaatataatttttggtgatgtgaataaagcggccatttagccgctttattggttttatgagggcgagaaaattagtttatcgccgcgtcagtgagtgcgtctgcaaggtgcagttgggtttgtttggcggttttgataatatatttcagtttattacaggtttgtattaattcatccgtttttgaaataatgcgatcttgttcactttgcggtagaagaggaaatagtgtcatctctaactgtttcgtagatatatgtggaactccattacttcttccaggatcaattgaatttatgaagaaataagattgcaaccatattgtcaagaaggagttagacacagtgtttgcataatttttaaattttgctactcgttggagtagtaaacagggtaaatctgatttgctaatgatagcatattttaacccggtattaataattggtctgtctaatgaaataacaatatcattttctgacaaaatataattttcaaaatcggatatcatgtcatttggtatatgtacaacatctttccaattggtaactccatgagcaatgttagcattccgcaataaacgtaaaccgacagaggtaaaccactcacttttaaaggcatatccatttaaaaaattataaatagaacccaatcgacaccactcccacccttccggcagttcaaacggtttttcctcatcactaattggcggcaacggtttttgtttttttattttcccttctttcaccaattgcgcttttttctgcgcaatacgtttgagcagttcagaggcgggttcgtcattcggatcctgcggcacaagtttacccattacggccagttgcagaatggtctgttttaacgcatccacgctggcttcagtggtaaatagtgtgtcgaaatgctcgctaatacgcgcccagttttcagccagttcctcgacgttttggctgtctgtaagtgttcccaacagggtttcaaccagttgctgatgtgcgtccagactggttagggattgctgttccagttggtcgcagagagacattaattgagtaaacctaataataatgcgctcttgttcttgcaatggagggaagggaataggattattttcaaaaaaaaaccttggaacacgtttctgaccagcagaaccagtcatttgtgattcaccagacttaagaaaattaggtgatttaaagtttaaaagaagatattttcgattaattatatcgctaaaagggcgtgcaacatgtaattctgttgttccaacaccaatgccgttttttaagccagaaaaaatagctgctttactattttcaaagcaaggtgttatttttgcaatagcgatatcaccattagcaaagtgtgtataaccttttttaacatctttccatttttttatttcaaattcatgcgagccatcaaatttagttgatatgagtggcattggaataaatgatatttcttgctcatcatcactgacatcaattttaggatttatttccgcaattctagttagcgttgtccactcccatccatccggcaattcaaacggcttctcttcctcgctaatttccggcagtggtttttgctttttaattttcccctgtttcaccagctctgctttttccgccgcaatacgcttcagcagctccgacgccggttcatcgttcggatcctgcggcaccagtttaccgcgcactgccagttccagaatcagctcacgtaatttcttaatgccatacaaatcaattttaccggaactgccgcgcccggcggtggaacgggtttgcaacgccgaggtccaggtttccatatgatcaacgatcagcttttccacactcatcagttaacctccttgacagacagcgcagcgccgagaatatcgcgcagttgattacgcagcgtctggatctccgcctgttgctttgcatactgcgctaacagttcgtccggatcatggctgacggtttccgcctgatgtgggtttttaatatccagattgaagttacgcgcaatcacgtcatcaatgctgactttccacgcttgctcattctcgacgcggctggcaaaaccatcggcctcgttaccccaccagtcgatctccgcctgaaactcttcaaacttcatcggcttggttttgctgtagtttttcacgcccgccggatacggatgctcatagaaccaaatctctttggttggctgacctttggtaaagaacaacaggttggttttaatgccggtataggggttaaacacaccattcggtaaacgcacgatggtatgcaggttgcactcttcggtaagtagctttttgattttggttttaacgccttcgccaaatagtgtgccatccggcaataccaccgccgcacgaccgtttttcgccagtacttccacaatcagttgcaggaacagatccgccgtttcgcgggtttgcatctctgccggaaagttcttctcaataccgtcttcttccgtgccaccaaacggcgggttggtaacaatgacatccagttgctcatcccaggaggaaagcggtttgttcagggtgttgtcgtgacgaatttgtactggtacttcaatgccgtgcagcagcatattggtggtcgccagcaggtgcggaagctgttttttctcaacaccgtggatctgttgttgcagcgtctgatgatcggcgacgctcttcacgtatttgttctttacatgatcaaatgcgcaggcaagaaaaccgcccgtaccgcaggccgggtccataatggattcgccgagtttcggatcaacgcgatccaccataaagcgagtgacggcgcgtggagtatagaattcgccagcattgcccgcagattgcagatctttaaggatctgttcgtaaatatcaccaaacagatggcgttcgctggcgctggtaaagtcaatttcgttcagcttgttgatcacctgacgcagtagcgtaccgtttttcatatagttataggcatcgctgaacgcctgcttcaccacgtagccgcgtgggtttttatcgataggcgcagtgaggtttttcaacgccgggaacagatcatcattaacgaattccagcagggaatcaccggtaatgccctgcgcgtttgcggcccaactgcgccataaataacgctgtgggatcggatattgatagttatcctgctccagttccagcgcctcttcctgggcatcgaagattttcaaaaacagcagccaggagagctgaccgagacgctgcgcatctccgtccacaccggcatctttgcgcataatatcttgtaatgatttgattactgagctgatagacatgttgtattccatgaaaaacaaggccttctgcaacatgatggttgcagaaggcacaaaagagagttgttaagcagagcggggcggtaattggtagatttcgttttccagctcgctgagcgcctgattatacccgttacggtcgccaaatccggttttaataatctccggtaaagtgcccatgctgtcgaatggtttaagtttcagcacctgaatactttcgatctcctgtacgcccgcatcggcgtatttatccagcagattatcgagcacggcttgcgctgcttcagagtattttgtgaagtagttccgcttgcgcacgttctcggcgcgctctttgcgggttaacggcggctgaccatatactacgtggcaaagcatgtcgaatgggtcgagatctttaccgacttcttctgccagtacttcccagatgatcccctgttgctccagctcgtgaatgatcgcttctttgcgatcggcgtcctgccacttgcgggtaaagtcatccagcgaggcatattctttgagcagtgttttgcgggtgtaatctttaaaggattcggtaaccagtttaccgtcggcgtcgtaatactgaacgcgctgtgcaataacgcccaccgctacaccgttgacgtgaaacttgcggattttcttctcgtcttcttccggaagtgggccgacatcatcggtatcggtaacctggtatggtggcgcaggcggttcatcaacgcctgttacctgttcttcgtcatgttcgctgatttcttcgagtttctcttcaaaatcagattctggatcggcgatatcctctggtgtggtatccatgactttttcgggaatgccatcgaaacgctcatcggcaaacagttcggtggcttttttaaagtcgaggatggtaaaccagagtttgccgtaacgttcgtcgatgcgtgtaccacgaccgataatttgcttgaatttggtcatcgactggatgttctggtccagtactaccagtttgcaggttttagcatccacaccggtggtcatcagctctgaagtggtcgcgataaccgggtacggttttttcgggttaatgaagttatccaactgagctttgccaatttcatcatcgccggtgattttcatgacgtatttgtcgttctttttcacctgctccgggttgagattaaccagggcgcggcgcatacgttctgcatgatcgatgtcgttacagaagacgatggttttatccatcgggttggtgcgcttgagatagtcggtaatggttctggcaaccagttctgtgcgttcgtcgattaccatcgtgcggtcgaaatctttctggttatagatacgatcgtcgatcacctcgccgtttaagtcagtttgccctttggttgggcgccagccttgcagatcaacatcaatatcaacacggacaactttataaggggcgaggaagccgtcttcgatcccttcttttagcgagtagacgtaaaccggatcgccgaagtaatccgtgctggagacttcatgcgtctcttttggcgtggcggttaagccaatttgggtagctgaactgaaataatcaaggatctctcgccaggcgctgtcttcggatgcgctgccgcgatggcattcgtcgatcacgatcagatcgaagaattctggtgcgacttgtttaaacgctttttggtcttcctccgggccagttatagcctgatagagcgcgaggtgaatttcataagcgggatcaatggtgcgtccgctgactttagtcattgccgtaccaaatggctggaaatcattatttttggtttggtcgaccagaatgttgcgatcggcaaggaacaaaatgcgttttttattttttgatttccacaggcgccagatgatctggaatgcggtataggttttccctgttccggtcgccatgaccagcagaacgcggttttgcccgttggagacggcttcaatggttttgttgattgcctgaagctggtaataacgtggcgatttaccgctgccatcgtcgtaatagtcctgagtaatcaccggaagctgagcttgtgtgtatcctttccagaggcagaatttttgccagagttcagcgggggaggggaagtcatccagcgttatttgcttttcaaggcattcaccttcggctgcggtggcatcgcggaagataaagccatccccgttggtggcaaaaacaaaaggaacgtccagcaggcgcgcatattcaatgccctgttgcatccctttgccaatttcatgtttgttggcttttgcttcaatcacggctaagggaatgcctggtttgtgatacagcacgatgtcagcagattttaccgttctgcgtgccgcaactttaccacgtacgatgactttaccgtcccggagtttgacctcctgtctgatttgcgttgtgttgtcccagcctgcattgagaatggctggcataacgcatttggtaatgatgtctgcttccgtcaggttacttaggttcagttccgccatggggtgttctcgcttttatcaggacgattctgattgtacataaaatcaatagcctggctatgacttagggcggtgtttcaacgtgaagtacgtagcagagatcacattgatatctctgttatatcttgcttgaattaatctgggcatatcagagacagataaacagaagttacaggaaccgtatcaactctaacaaaatatataaaaatcttatagttgcgtttctttcgagcaagaaagataatgttattgttgattgtttgattgggtatatgaaatggaagctaaagaatgtaaggtgcaggatatccttactgaaaacaaaaagtttattattccttcttatcagcgtccttacagttggacggtagataatgcagagcaactcattgatgatatttataaaagctctcaatcagaagagaatgaatattttattgggagtatgatttgtatcaataaagggcaaaatcagtatgaagttgtagatggacaacaacgtcttacaacgttaagcattattgtctccgagctaaaaaaaatcatcccgattcaggggataaaagatgatttgcaaaaaagagttctgcctattgatgtttattctgatgaaacagatgaaccaaggctaattgttagaaaaaaagagtatgatctttataaatattatatacttcaggattctaaagattataaacctgaaaaaccatcggatactgagttagtattcattagcaacgctgaaacaattagagattacttgttgcggttatctgttgatgagttgaagttgcttgctaaatatattttgcaaaatgtatatatcgtatttgtgcaaactgatgatttcgcatcatcatttagactctttaatgtattaaatagtcgaggtttacctttaagtaatgcagatcttttaaaaaatgcactgtttgaatcagcttctacgcataataaaaaatcagagcaaatagaatcagcatggtcgcaaattgaagatatggttggagtgagacggcttgataaatttcttactcttcataagctttccgagaaaaaagatcgtgacagggtgttacaaaaaggttttgaagcttttattgaaaatctccagcagcaatttgatggagatgctattgctatgtcactgatgttggttaattctgcaaaaaattatactaagattttagagaatgattttgaacactcttcaatacgacgaaaaatagcatcactaagtaatttaggggtagatgagtggattcctccggttatggcattcatgaatcgaatggctcgtacagaagattttaatttagatgatttttctcaatttattaccgcctttgagaaggtatatatgcatgggtggttaaaaaaacaaattaaaagccaaagagaaatggtttgttattcagctctggtagcaataaataatgatatgtcttttgattctgtgataaatcagataaaccaacatgcagataattcaggttttatagctgctctggatgaagatttatatgagcctcgtccgaatcaagtgaacttaataaaagcaattttgcttcgcttagatatggagcaacaagatgagagcgtgattaaaacctatacggggagaatcacaattgagcatattcttcctcaagcattagttaatgaatactggattaatagattccaacctcaagagcatgtctactggctgcataaaataggtaatttaacactcataagtggttccaaaaattctgaagcacaacactatgattttatcaaaaagaaatctatttatgagaaacttaatagtaaaagctcttttgatttaacaaaagatgtttgtaattcttcagaatggggattggctgaactgaaaatgagacatgaaaaaatgaaaacgcaattgaagaagctttggttggtctgacatatctaaagagttccactcgtaataatgttgcggtggaactctcaaaaagttgatctttcccgaa

SEQ ID NO: 226 - DNA, 114 bp, Escherichia coli
tttgccttccagatatgcgtaaagcccggaaggtccgggctggggatttgccggatgcggcgtaaacgccttatccggcctacgatagacattttgtaagccggataaggcaac

SEQ ID NO: 227 - DNA, 5353 bp, Escherichia coli
cgtaatgatgccggatgagtatttcatccggcgtttttattattaaaccaggaacagtgaaatcgccgggatatatgtcaccagcattagcattaacagtagagccgccagtaggggcagggattgtttaaagaaatttcccaccgaaacttgcgtgatattacataccagcagcatcacggtacctaccggtggcgtgaatgcgccaatcgacaggttgaagatcatgatgatgccaaaatgcaccggatcgatgccaaagtgttcgaccaccggttttaatagtggtaccaggatcagcaaaatggcgtttccttccagaaacatccccagcgtcagcagcaatatgttgataatcaacaggaacatgtatttgttttcggtcagcgaagtcacaaaattcgccactgcgacaccagcatgttccattgagaaaatccatcccaatgcggcgctggccatgattaccagcatcaccgatgcggttgcgcgtgccgtttcgcccaatgctttgacgacatgagaaatccgcatttcacgatagataaaaaagccaatcgccagcacgattagcaccgctactgcacctgcttctgttggggtgaaaatgttagcgcgaataccacccaccacagcaaaaatgaggaacagcgcaggccaggcctgtcccagcgagaacaccacctctttgcccgtaggccagctttcacgcgagggtttagcgttagttttgcgggcgacaaggtagacggtaaacatcagtacgactgcgcatagcaaaccaggtaccagtccggcgataaacatttttccgatagagacgtcggcaaccagaccgtaaataatcagggctattccaggcggtatgatcggggtgactaacgagccaccagcggtaatggcggcggcaaacgcgcgattgtagcctttacgctccatctccggcaccatcatgcgcgacagcatcgccgcgtcagcaaggttagaggcgctgacgccgcccatcatggtgctgacgagaatgtttgccacgcccagtccgccgcgcattttccccaccagaacgttggcaatgtgcaggatgcgttcggcaatgccggtgtagctcattagtgtgccgagcaagataaaaaacggaattgccagcaatgatgggctttgcgttggcgcgattagtctttgcacggcaatttcaatcggtacgctggagaagaataaaaagtaagcgatgatgccaataaacatcgccagatagacccgaatgttgagaaacaaacagacgatcattagcggaataatcaataaccaactcattgcattttgtctccgctatcggattgttttgtatcgtttattaaccagtagagggtataaatagccgttgccagtgcgccgacagggaccgccagatcgatccagaaccatgaaaccttcagaatttgtgtcactttaaactgcgccatttcggctagtcggtagcccagccaggccatataaagcagcagtgcgatggagagaagggcgaccagtactgcaataacacgcctgagtttgcctggaagcatctccatcaggaagggaatggtcaggtgcgccctgtcacgttccgccaccactccacctaacatcaccacccaaatcatcagcattcccgacatttcttctgtccattgaagcggttggccgatgaaataacgcataaataccgctccaattgtcaccacaaccagaacgaatagcgcaaaggcagcactaaattctgccactttgccaaaaagacgcatgaaacctcctgttagtgcgtgtcctgcctaagagagatgaggcaggacgctgagcattaatgcttattgcagttgctgttgaatggtttcgtacagacctggtgtccattccgggaattgagagtaaacttcgcgtgctttcttctggaatggtccagtatcgggatagatcacttcgacgccggctgcctgcatggttttcaacatttcggcatcacgctcaagagtgagtttctggctatagacacccgcttcatagccggtctggtggatcatctccagttgttctggtgaaagggtgccaaagaaggcttcaccacctatccacactgaggtatttgtcaggtagttaaccattgtcagatatcttgcctgctcatacagtttttgcccttgcagcactgaaattgggttttctacgccgtcaataacgccctgggttaatgcgggataaacttcgcctaatggcatgggagttggtgttgcccccatcgcctgaatggcttttatttgcatgacgttattaggaacgcgaatttttaaacctgcgagatcgtcaacggtgcgaatgggttttttcgaaataatctgtcgagtgccatagagataattattcattaccacatgaattccctttttcttcagactttcatttttttgtttaaaccagtcgctttcatatattttgaacagtttttgcggatcgtcagtcagatacggtccaaacaaaatccccaaatcgggttcataatcggcaagaaaagccacatcactcaaggttatgacattcatgcccatcatggcttgctcggtgacatcctgttttgatcccaattgggagctgggatagagcgcaagtgttatttcagccattactttttttgkttaataggtctgcccagtaacggcatgaccacatccaggggttccccagggttattttcataggcaacttttattgaaataggttttgcctggattattgacggtaaaaaaagggtactgacagtaattagcatcgctattattttgctcatctttacttactccatgctaaggaaataaaactccaacattgttgtcgggagtgaaaccttatgaaaaagcagtcattactgaaaagtagtcagcgaatagcagaatggctgcagatgtatcataaattcgtgcaccgggtaatactttgctgcttttaatcggtttttaatgcattttttgattgtatatcttaaagttatgtaatgcatgacgttacaaggaacaccctctgatgagtttagttaccgctgataagatctcttattctgttgatgatttattaaaaataaaatcattaatttggctgcggccattttaaattgtcaatacagataaaaactaagtgttgacgcagaatggtggtatccattaaatttatttagtgctgatttaatacatttgctgaacgtataattcatgctgatattaaaagaaagccgtcattcactaaataacttgttcggcaaggaaatcagagagtaacggatgattcgttacaacggggaaaggcagtaaatattcacatggtgaatttgttatcaacttgaaaacttattttactgggttccttctgatcatgtgagtgaacgcagtgattaatgattaacgttaagtgctaaccagagcgctttttatgaagttaaattaataatatccattatttatgaatgaggaagcctgtttattatatggaaatacttttaacaattttaattcttacgttggtagtatcattaaccagcgtgcttacacgtctgtctcctgtccagataccacttcctttaatccagattgccgctggtgcagtactggcccagcctatatttggtctgcatgtggaattcaatcctgaactttttctcttattgtttataccacccctgttgtttgctgaaagttcaaaaatacaacctaaagaattgatcaagcacagccgggaaattatcagcctggcacttgtgttggtactaatcactatttttggtgtcggctatgtgattcatttactcttaccgaatgtgccgctcatcgctgctttcgcattagccgccgtgttgtcgcctaccgatgccgtggcgttgctggggattgtcgggaaagggcgtatcagcaaaaacatccaggaagtgctcgaaggcgaagcgttgatgaatgatgcttccggcctggtggcgttgaaatttgctgttgcagtgacgatgggaacgatggaattcagcgttcatggcgcaaccattgcgttttttgtcgttgcgttgggcggtattgccgtggggatcgctgttacctggttatatggtaaagggctgctgttgatcagccgatatgctcacgatgaaccttccattcagattgtattgatgcttctgttgccgtttattgtttatctggttgcggaacattttggcttatctggcattcttgccgctgtcgccgcggggttaacaaccagtcgcattggcgtagtccaccacgcgcctattcgcctgagaattaaagctaaaagtagctggtcgatgcttgaatatgtctttaacggcatggtgtttctgattttaggcttacaactgccgggcattatttcggaatcactgatccgtgcagaaaacgatccactggtggacaccggatcgctgctccttgatgtcatttggatctacctggcgttaatggttgtgcgcctgggctggctttggctgatgcgtctgtatagccgtaaacgacccggcaaacatccgatgctgtttgctggatataaaacgcgtcatatgctgctggcgacctttgcgggggtgcgcggagctatcacgcttgcgggggtgctttctatcccgttattgctgccggatggcacaccttttcccgggcgttacttgctggtatttctcgccacaggtgtgatcctcttttcgctggtttgcggcattattattctgccgttattactggggaaaaatgtggggattttcagcgataaccgacaaaaagaagaggaagctgccgatctgtttatggctaaaatggccatactgagtgtgcaaaagaccgagcaacgtttgctgcgcgccagaacagaaaacctcgataacgagttgattatggaaacgggggccagagttatcggttatatgcgacatagtgaagaggatatgtcgcctaatgataattccctgcatatgcagcgtgcgaagctggaaagaacatttaatctggcggcgttaaatgccaaacgcgcggctatttaccagatgcgcgcaaggcaagaagtcagtgatgaaacactggcaaaaatagtcagtgaattagatgtgctggaaacgttaatcatggatagccgataattttatcgctgtcagtaatagggagttaaatgatggctgagagtaatacttccagcatcgtttattccctatgtatttccttatgggcagaacaatcgcctggattaatactgcattaatacaacatagtgatataaaccaagaatcaatgtttttaatctgtacttaatttatcggtgatgttgcctg

SEQ ID NO: 228 - DNA, 69 bp, Escherichia coli
cgatcatccgcatattttatgggtaaattcaggcgctcttataaattcgacgatatctgaaagtcataa

SEQ ID NO: 229 - DNA, 54 bp, Escherichia coli
gcttgatttgccggatgatgcagcgatgctcatccggttccccgattacctcgt

SEQ ID NO: 230 - DNA, 710 bp, Escherichia coli
ttattgtgcacagaaaacccccagctaggctgggggttccggaaagctttcagctttgagccagttattaaaaccccttttgatttgttaaaacaccttgcggtctggcaactgcaagtgtcaaacaagaaatcaaaagggggtcccaatggggaacgaaaagagcttagcgcacacccgatggaactgtaaatatcacatagtatttgcgccaaaataccgaagacaggtgttctacagagagaagcgtagagcaataggctgtattttgagaaagctgtgtgagtggaaaagtgtacggattctggaagctgaatgctgtgcagatcatatccatatgcttgtggagatcccgcccaaaatgagcgtatcaggctttatgggatatctgaaagggaaaagcagtctgatgccttacgagcagtttggtgatttgaaattcaaatacaggaacagggagttctggtgcagagggtattacgtcgatacggtgggtaagaacacggcgaagatacaggattacataaagcaccagcttgaagaggataaaatgggagagcagttatcgattccctatccgggcagcccgtttacgggccgtaagtaacgaagttggatgcaaatgtcagatcgtgtgcgcctgttagggcgcggctggtaagagagccttataggcgcatttgaaaaacctccggctatgccggaggata

SEQ ID NO: 231 - DNA, 713 bp, Escherichia coli
ttgtgcacagaaaacccccagctaggctgggggttccggaaagctttcagctttgagccagttattaaaaccccttttgatttgttaaaacaccttgcggtctggcaactgcaagtgtcaaacaagaaatcaaaagggggtcccaatggggaacgaaaagagcttagcgcacacccgatggaactgtaaatatcacatagtatttgcgccaaaataccgaagacaggtgttctacagagagaagcgtagagcaataggctgtattttgagaaagctgtgtgagtggaaaagtgtacggattctggaagctgaatgctgtgcagatcatatccatatgcttgtggagatcccgcccaaaatgagcgtatcaggctttatgggatatctgaaagggaaaagcagtctgatgccttacgagcagtttggtgatttgaaattcaaatacaggaacagggagttctggtgcagagggtattacgtcgatacggtgggtaagaacacggcgaagatacaggattacataaagcaccagcttgaagaggataaaatgggagagcagttatcgattccctatccgggcagcccgtttacgggccgtaagtaacgaagttggatgcaaatgtcagatcgtgtgcgcctgttagggcgcggctggtaagagagccttataggcgcatttgaaaaacctccggctatgccggaggatatttatt

SEQ ID NO: 232 - DNA, 712 bp, Escherichia coli
ttgtgcacagaaaacccccagctaggctgggggttccggaaagctttcagctttgagccagttattaaaaccccttttgatttgttaaaacaccttgcggtctggcaactgcaagtgtcaaacaagaaatcaaaagggggtcccaatggggaacgaaaagagcttagcgcacacccgatggaactgtaaatatcacatagtatttgcgccaaaataccgaagacaggtgttctacagagagaagcgtagagcaataggctgtattttgagaaagctgtgtgagtggaaaagtgtacggattctggaagctgaatgctgtgcagatcatatccatatgcttgtggagatcccgcccaaaatgagcgtatcaggctttatgggatatctgaaagggaaaagcagtctgatgccttacgagcagtttggtgatttgaaattcaaatacaggaacagggagttctggtgcagagggtattacgtcgatacggtgggtaagaacacggcgaagatacaggattacataaagcaccagcttgaagaggataaaatgggagagcagttatcgattccctatccgggcagcccgtttacgggccgtaagtaacgaagttggatgcaaatgtcagatcgtgtgcgcctgttagggcgcggctggtaagagagccttataggcgcatttgaaaaacctccggctatgccggaggatatttat

SEQ ID NO: 233 - DNA, 711 bp, Escherichia coli
gtgcacagaaaacccccagctaggctgggggttccggaaagctttcagctttgagccagttattaaaaccccttttgatttgttaaaacaccttgcggtctggcaactgcaagtgtcaaacaagaaatcaaaagggggtcccaatggggaacgaaaagagcttagcgcacacccgatggaactgtaaatatcacatagtatttgcgccaaaataccgaagacaggtgttctacagagagaagcgtagagcaataggctgtattttgagaaagctgtgtgagtggaaaagtgtacggattctggaagctgaatgctgtgcagatcatatccatatgcttgtggagatcccgcccaaaatgagcgtatcaggctttatgggatatctgaaagggaaaagcagtctgatgccttacgagcagtttggtgatttgaaattcaaatacaggaacagggagttctggtgcagagggtattacgtcgatacggtgggtaagaacacggcgaagatacaggattacataaagcaccagcttgaagaggataaaatgggagagcagttatcgattccctatccgggcagcccgtttacgggccgtaagtaacgaagttggatgcaaatgtcagatcgtgtgcgcctgttagggcgcggctggtaagagagccttataggcgcatttgaaaaacctccggctatgccggaggatatttatt

SEQ ID NO: 234 - DNA, 395 bp, Escherichia coli
tcatctttataagatgttgagtgggattactgatttaaaagtgtacttagtactccatttaggtgtacaatgtacctgccagggagggggaatgggtaaggcgataatatttatagagacgccaatgtttacgcgtcagatcaagcagattgcaaccgatgatgaattaaaggaattacaaaaagaactcatcggaactcccgataaaggtgatctcattcagcagactggtggattgcgtaaagtccgaatggctgcgggttcacagggaaaaagtggcagtgtcagaataatttactttctggcgacggaagagattatttatttgattatggcctatccgataaatgccaaagatagtctgacagatacggaaaaagctcaactaaagaagt

SEQ ID NO: 235 - DNA, 202 bp, Escherichia coli
cgtgagcaactcaacgtttctcaaagtgagatggcaaaagctctgggaaccagtgtggataccattaaaagctgggaatcgaagcgaagaaatcctacgggattggctgcaaaagtacttgccacaattaaagaaaatcctgcctttttccgggaacttgcttcccattaatcatttaactaataccggatgcgatgctggt

SEQ ID NO: 236 - DNA, 711 bp, Escherichia coli
gtgcacagaaaacccccagctaggctgggggttccggaaagctttcagctttgagccagttattaaaaccccttttgatttgttaaaacaccttgcggtctggcaactgcaagtgtcaaacaagaaatcaaaagggggtcccaatggggaacgaaaagagcttagcgcacacccgatggaactgtaaatatcacatagtatttgcgccaaaataccgaagacaggtgttctacagagagaagcgtasagcaataggctgtattttgagaaagctgtgtgagtggaaaagtgtacggattctggaagctgaatgctgtgcagatcatatccatatgcttgtggagatcccgcccaaaatgagcgtatcaggctttatgggatatctgaaagggaaaagcagtctgatgccttacgagcagtttggtgatttgaaattcaaatacaggaacagggagttctggtgcagagggtattacgtcgatacggtgggtaagaacacggcgaagatacaggattacataaagcaccagcttgaagaggataaaatgggagagcagttatcgattccctatccgggcagcccgtttacgggccgtaagtaacgaagttggatgcaaatgtcagatcgtgtgcgcctgttagggcgcggctggtaagagagccttataggcgcatttgaaaaacctccggctatgccggaggatatttatt

SEQ ID NO: 237 - DNA, 174 bp, Escherichia coli
agactgatgacaaacgcaaaactgcctgatgcgctacgcttatcaggcctacgatcttcttgcaatatattgaatttgcacgattttgtaggccggataaggcgttcacgccgcatccggcataaacaaagcgcacgttgttaacaatcttatcccttcgagcggggggagctt

SEQ ID NO: 238 - DNA, 3999 bp, Escherichia coli
cagggattcacaaaaaaaggtgttttcctctatcaaaagtgaatggctaaaggaaattaattattaaaggttactgtaatactatagagagacaaagaaatacgttcagcagctaatgctaagttcatcatgaaaaatgcctataaatcaaagggtgatgtttaaaacagacacattttctgaaacacgatatccctccgcccgttcgcaaaagtaatctgcgatcttcatcacgcttcgatagtcatctttaaatatactggcctggtcattcttaataaaaatgaattgtctggtgtattaattcctatggaatcataaaaacaatgaatggagaacatattatatgtctgccaaaagacgacttcttattgcgtgtaccttgataacagctatctatcattttcctgcatattcttcattagaatataaaggaacctttggttcaataaatgcgggttatgcagactggaacagtggatttgtaaacactcaccgtggtgaagtatggaaagtgactgcggattttggggtaaattttaaagaagcagaattttactcattttatgaaagtaatgtactcaatcatgctgtagcagggagaaatcatacggtttcagcaatgacgcatgtcagactctttgactctgatatgacattctttggcaaaatttatggccaatgggataactcatggggtgacgatctggacatgttttatggattcggttacctcggctggaacggcgagtggggcttttttaaaccgtatattggattgcataatcaatctggtgactacgtatcagctaaatatggtcaaacgaatggttggaatggttatgttgttggctggacagcagtattaccatttacgttatttgacgaaaaatttgttttatctaactggaatgaaatagaactggacaggaacgatgcttacacggagcagcaatttggccggaacgggttaaatggcggtttaactattgcctggaagttctatcctcgctggaaagcaagtgtgacgtggcgttatttcgataataagctgggctacgatggctttggcgatcaaatgatttatatgcttggttatgatttctaatttttatcagggaataattatgcagaaaacgttaatggccagtttgatcggccttgcagtttgcacagggaatgcttttagtcctgccttagccgcagaggctaaacaacctaatttagtcattattatggcggatgatttaggttatggcgatttagcaacatatggtcatcagatcgttaaaacacctaatatcgacaggcttgcccaggaaggggtcaaatttactgactactatgcccccgctcctttaagttcaccttcacgcgcagggctattaaccggccggatgccatttcgtactggaattcgctcatggattccttcaggcaaagatgttgccttagggcgtaacgaactcacgattgctaatctactcaaagcgcaagggtacgacacggcaatgatgggtaagctgcatctgaatgcaggcggcgatcgcaccgatcagccacaagcacaagatatgggctttgattactcactggctaatacggcgggctttgttaccgacgccacgctggataacgctaaagaacgcccgcgttatggcatggtttacccgacaggctggctacgtaatgggcaacccactccacgagccgataaaatgagcggtgagtatgtcagttcggaagtcgtcaactggctggataacaaaaaggacagcaagcctttcttcctctatgttgcttttaccgaagtgcatagccccctggcttcgcccaaaaaatacctcgacatgtactcacaatatatgagcgcgtatcagaagcagcatcctgatttattttatggcgactgggcagacaaaccctggcgtggtgtgggggaatattatgccaatatcagctatctggatgcacaggttggaaaagtgctggataaaatcaaagcgatgggtgaagaagataacacaatcgttatttttaccagtgataacggtccggtaacgcgtgaagcgcgcaaagtgtatgagctgaatttggcaggggaaacggatggattacgcggtcgcaaggataacctttgggaaggcggaattcgtgttccagccattattaaatatggtaaacatctaccacagggaatggtttcagatacacccgtttatggtctggactggatgcctactttagcgaaaatgatgaacttcaaattacctacagaccgtactttcgatggtgaatcgctggttcctgttcttgagcaaaaagcattgaaacgcgaaaagccattaattttcgggattgatatgccattccaggatgatccaaccgatgaatgggcgatccgtgatggtgactggaagatgattatcgatcgcaataataaaccgaaatatctctacaatctgaaatctgatcgttatgaaacacttaatctgatcggtaaaaaaccagatattgaaaaacagatgtatggtaagtttttaaaatataaaactgatattgataatgattctctaatgaaagccagaggtgataaaccagaagcggtgacctggggctaacctgataatcataataaatgtaatgtatgccatttagggctatgcccgcctgattcagtgctacgcattgaatcaggttcttttcgcgttgaacaatatcaagatacggctattcgcagggagtggatatgtttaccaacgtaaatgttgattgttgcaaaacaccaggatgtaaaaacttggggttgctgaatagccaggattatgtcgcacagggtaaaaatattttatgccgtgaatgtggttacttgtttccagtgatatctgaacagtcgcttaatatttatcgtaatattgtgaatcactcctggagaggtttgatttgccaatgttcaacttgcggaggcacgtccctcaaaaaatatggatattctgcacaaggccagagaagaatgtattgccatcattgtgagaaaacatttatcactctggaacacgtaattaccacaccacgaggagcccagttagcattgatgattgagcaaggggaggcacttgcggatatcagaaagtcattacttcttaacagcactggacttagccgtgaactgttaaaattagcgcgtgaagcaaactataaagaaagtcgacagtgtttcccagcttctgatattaccctgagtacccgcgcttttcgcgtcaagtataatggtagcaataactctctttatgctcttgttaccgcagaagaacaaagcggcagggtggttgctatctcaaccaattactccccatctgccgtagagcaacattatcaatacacatcgaactatgaagagcgtatgtctccagggacgctggcacatcatgtccagcgcaaagagttacttactatgcggcgggataccttgtttgatattgattacggcccggcagttttacatcaaaacgatccgggaatgttggtaaaaccggttcttccggcatatcgtcattttgaactggtcagaatactgaccgatgagcattccaacaacgttcagcattaccttgatcacgaatgctttatattgggcggctgcctgatggctaatttgcagcatattcatcaaggtcgctgccatatttcctttgtcaaagagcgcggtgtggcacccgccaccattgattttccaccgcgattattccttagtggtggggtacgaaataatgtctggcgtgcattttctaaccgcaattattcaatggctgtatgcaatctcactggcagtaagaaagtccgcgagatgcggcatgcaacattgaacagtgcgacgcgttttatccactttgtggagaaccatcctttccttatatcattgaaccgaatgtctcctgcgaatgtcgtttctacattagatatcctcaaacatctgtggaataaaaaactagagcatgg

SEQ ID NO: 239 - DNA, 52 bp, Escherichia coli
ttcaaaataaacatttgtactttgcaggccgaattttggcctgcagatggat

SEQ ID NO: 240 - DNA, 425 bp, Escherichia coli
ctctaataataaaacaaggaagtgttctatgacgtatggagaagcgtatctggaagggtggaaaaacatctttaattatgaaggtgtttccaatcgcttcgagttctggtcgtttatgattggtagtggcgttatctgtctgcttccgcttttatgttggtggttagcggtaacaattaacaatgactatggtgttttcattttttttgcgctgcccgtgtcatttattttaacgttgatttttgccgtaccggcgatagcgttagccgtcagaaggatgcacgatatcggatattcagggtggtgggttaccattgccgtgttgatccctgttacgggcgtaattctgcttatactgtgctgcctgccgtcaaagtcacaagaccaggcataatgccagagggtatgacgcatcactttctgcg

SEQ ID NO: 241 - DNA, 635 bp, Escherichia coli
ttagaattccggcatcactgatacgtgcagatatccgtgtatactagacgtataaattgtacaggagcacgagatcatgactgcaaaacgtaccacacaaagtgtgaccgtcaccgtcgaccgtgagttagtcaatcgcgctcgtgatgcaggcttaaatatgagcgccacccttacggttgcgctcaatgctgaacttaaaaaacatgcagcaacacgttggcgtgaagagaacgcagaagctatcgctgcgttaaatcaattggctgatgaaaccggatgtttctctgatgagtaccggagcttctagcgatgcaatttacggtataccgcagtcgcggcaggaacgccgcgtttccctttgttattgatgttaccagcgacattattggtgagattaatcgccgtatcgttattccattaacacctattgaacgatttagccgtattcgcccaccagaacggcttaacccaatccttttactggtagacggcaaagaatatgtgctcatgacgcatgagactgcaactgttccagttaacgcgctgggaacgaaattttgcgatgccagcgcgcaccgaacgttgattaaaggagcattagattttatgctcgacgggatttaagacgctac

SEQ ID NO: 242 - DNA, 119 bp, Escherichia coli
aagtttcaacgtgtaggcctgataagacgcggcccgcgtcgcatcaggcaatcggcgcaaaattgccggatgcggcgtgaacgccttctccggcctaccgaacttcgccagcgtgacta

SEQ ID NO: 243 - DNA, 1827 bp, Escherichia coli
agggcaggttgtgaataataagaaagaagggggggaacccccttgctttcttcatctgacgttatttatatatttcacgggggattaattttagttatttttagttgaatcgttttacctgaattattttttttcttgataaaatatcgacaacgatttctttttgtaaaaataaaacgaaggcttatgtatcgggatacccatcatgaacatattgtccggttgcatcaggagaatatatcaagcggtttgttcatcgtaggaacaccacattgagcggttatggcaggcacttcacgccaccataaatgccgttcgatgtggcagttgttgaaaaaagtacggcattctatgaaaaacgccagttactccctcagaggagaacatggtctggcaaaagtgtagcggcatcaggcgcagctatctttgtaaattcattcataaaatgaattgtatacaaaaaaatattgaaaaataatatttttccttattgatattatttgctatacgttttttttgaggggagattgtgatgagcaaacgtaacgatattactgatggaatatttgcaacaacgaaaaagtatggattagtttataccgaagagttaggttggatcgatttggggcatgctcagggacaagatgccagaatattaaaaagaaaattggagcaagaacatttttcaacatattacgatgaatttcatgattggtattttcctgttgattatcatcaggaaatgggaattcggaaaaaatattaggagtagatcttacatttcataccggtgtttatacgaaggttatggttcgttcatgtctttcacccactcttaaagcaagagttgccttaacgttaatgtatggaactgcgaagaggtttgaagcatggcaaaactcatttatttttaactggtatactgatagcggatttagtgcagaagatttagtctcagacttgattggtttttatcgtgtatttggaacaggccccgatccacttttattggcaaaacctttatcttacacaaaagccttacaaatatgggatacatatggagcgccagggaattttaaaaatactgagtttacgccattcttatttacaacccatcctccttttaaaaaaaatcaactaataaaaaagaagcttccagaatggttaaattatataaagccattagatgagtctttttcaacattgttatataatcaatataataatagacctgttactaattattataaagataaaaacagaataaatcatgagttgtatagttcattatcaagttcgggagctataaagttttcagaatctccctttgaaagaccgctttttcttttcttaaaccctcattatccgcacaggtcgtgagtagagatgtcaaaatatatttatattttattatcatttttagttttattctttatatttttctatgcttatatctcattgatgtcaaaggaacatcactatacacagcatgaactttccccatttttcctttatacgccagagagtttgcgaaatttgccaaacatatcaaacgtagccgagtatagctattactataatgttgatgatatgcaaacaagagtgattgttacatggcgaaatatagataacatttttcttcagaaagcaaagctaatagattttttgaaaagaatgggaccgagtctacaaaacgattgtatatggttttttcatgataaaagtgattatgcaaataatttccagcgttattgcgtcattgagcaccgtgattctctgcaggtggaatattttgagactatcgaatgataggcagagggtgtcttt

SEQ ID NO: 244 - DNA, 712 bp, Escherichia coli
tttgtgcacagaaaacccccagctaggctgggggttccggaaagctttcagctttgagccagttattaaaaccccttttgatttgttaaaacactttgcggtctggcaactgcaagtgtcaaacaagaaatcaaaagggggtcccaatggggaacgaaaagagcttagcgcacacccgatggaactgtaaatatcacatagtttttgcgccaaaataccgaagacaggtgttctacagagagaagcgtagagcaataggcagtattttgagaaagctgtgtgagtggaaaagcgtacggattctggaagctgaatgctgtgcagatcatatccatatgcttgtggagatcccgcccaaaatgagcgtatccgggtttatgggatatctgaaagggaaaagcagtctgatgctttacgagcagtttggtgatttgaaattcaaatacaggaacagggagttctggtgcagagggtactacgtcgatacagtgggtaagaacacggcgaagatacaggattacataaagcaccagcttgaagaggataaaatgggagagcagttatcgattccctatccgggcagcccgtttacgggccgtaagtaacgaagttggatgcaaatgtcagatcgtgtgcgcctgttagggcgcggctggtaagagagccttataggcgcatttgaaaaacctccggctatgccggaggatattta

SEQ ID NO: 245 - DNA, 711 bp, Escherichia coli
ttgtgcacagaaaacccccagctaggctgggggttccggaaagctttcagctttgagccagttattaaaaccccttttgatttgttaaaacactttgcggtctggcaactgcaagtgtcaaacaagaaatcaaaagggggtcccaatggggaacgaaaagagcttagcgcacacccgatggaactgtaaatatcacatagtttttgcgccaaaataccgaagacaggtgttctacagagagaagcgtagagcaataggcagtattttgagaaagctgtgtgagtggaaaagcgtacggattctggaagctgaatgctgtgcagatcatatccatatgcttgtggagatcccgcccaaaatgagcgtatccgggtttatgggatatctgaaagggaaaagcagtctgatgctttacgagcagtttggtgatttgaaattcaaatacaggaacagggagttctggtgcagagggtactacgtcgatacagtgggtaagaacacggcgaagatacaggattacataaagcaccagcttgaagaggataaaatgggagagcagttatcgattccctatccgggcagcccgtttacgggccgtaagtaacgaagttggatgcaaatgtcagatcgtgtgcgcctgttagggcgcggctggtaagagagccttataggcgcatttgaaaaacctccggctatgccggaggatattta

SEQ ID NO: 246 - DNA, 711 bp, Escherichia coli
gtgcacagaaaacccccagctaggctgggggttccggaaagctttcagctttgagccagttattaaaaccccttttgatttgttaaaacactttgcggtctggcaactgcaagtgtcaaacaagaaatcaaaagggggtcccaatggggaacgaaaagagcttagcgcacacccgatggaactgtaaatatcacatagtttttgcgccaaaataccgaagacaggtgttctacagagagaagcgtagagcaataggcagtattttgagaaagctgtgtgagtggaaaagcgtacggattctggaagctgaatgctgtgcagatcatatccatatgcttgtggagatcccgcccaaaatgagcgtatccgggtttatgggatatctgaaagggaaaagcagtctgatgctttacgagcagtttggtgatttgaaattcaaatacaggaacagggagttctggtgcagagggtactacgtcgatacagtgggtaagaacacggcgaagatacaggattacataaagcaccagcttgaagaggataaaatgggagagcagttatcgattccctatccgggcagcccgtttacgggccgtaagtaacgaagttggatgcaaatgtcagatcgtgtgcgcctgttagggcgcggctggtaagagagccttataggcgcatttgaaaaacctccggctatgccggaggatatttatt

SEQ ID NO: 247 - DNA, 711 bp, Escherichia coli; identical to SEQ ID NO: 246

SEQ ID NO: 248 - DNA, 746 bp, Escherichia coli
gtgcacagaaaacccccagctaggctgggggttccggaaagctttcagctttgagccagttattaaaaccccttttgatttgttaaaacactttgcggtctggcaactgcaagtgtcaaacaagaaatcaaaagggggtcccaatggggaacgaaaagagcttagcgcacacccgatggaactgtaaatatcacatagtttttgcgccaaaataccgaagacaggtgttctacagagagaagcgtagagcaataggcagtattttgagaaagctgtgtgagtggaaaagcgtacggattctggaagctgaatgctgtgcagatcatatccatatgcttgtggagatcccgcccaaaatgagcgtatccgggtttatgggatatctgaaagggaaaagcagtctgatgctttacgagcagtttggtgatttgaaattcaaatacaggaacagggagttctggtgcagagggtactacgtcgatacagtgggtaagaacacggcgaagatacaggattacataaagcaccagcttgaagaggataaaatgggagagcagttatcgattccctatccgggcagcccgtttacgggccgtaagtaacgaagttggatgcaaatgtcagatcgtgtgcgcctgttagggcgcggctggtaagagagccttataggcgcatttgaaaaacctccggctatgccggaggatatttattctttttggcgattgagtgccggacggtgtacaaac

SEQ ID NO: 249 - DNA, 1463 bp, Escherichia coli
tgaactgcaccccaaatgttggacataatctgacatctgaaggtgcagtttatgaaacattcatttgaagtaaaacttgccgctgtaaatcattacctggctggtcatgcaggcatcatttctacggcaaaactctttcaactttctcacaccagcctctcacactggattaatctttttcttcttcacggtcctcgggcactggattgcagacacaagcgtagctattctcctgaagataaactttgcgtggttctttatgctctcgggcattctgagtctctaccccgggtagcagcccggtttaacattcccagccacaacacggttaaaaactggataaaaggctaccgcaaatctggtaatgaggcctttatcaggcgcaggaaggagaaaagcatgacccgttctgatgatacccatgaaaacgaggcaaacatgacgccggaagagatgaagaatgagctgcgttatcttcgcgcagaaaatgcatatctgaaagccatgcaggagcatcttctggaaaaaaagcgccaggagctggagaaaaaacgaaagtcatccagagcctgaggtacggacactgccagtctgacctgttaaaggccgcagggcagaagcacgctgtactaccagctgtcactgcagaaggctaaggacaagtatgctgatgtgaaacagctcatagcctccatcttccatgaacaccggggatgttatgggtaccggcggatccattgtgagcttcagaaaagaggtcttaagttcagtggcaaaacggtgagaaaactgatgcaacagctcggcctgaagtctcctgtgcgcctgaagaaataccggtcttaccggggaaatatgggactcgctgcagaaaatatccttcagcgacagttcaaagcggaagctccctgtgagaaatgggtgacagatatcaccgaattcagggctggcggacaaaaactgtacctgtccccgatacttgatttgtttwacggggaaatcgtggcgtgggaaacggcctgcaggcctacagargagctggtgaagcggatgttaaataagggtctggaaagccttgctgaaggggagaaaccgctgctccacagtgatcaaggatggcattaccggataaaaagttatcagtccgccctggcggacagagggttagtgcagagcatgtcgcgcaagggcaacwgccttgataatgcggtaatggagaacttctttggtcacctgaaagaagaaatgtactatcgccgggactacagaaatgtagaagagctggaaaatgccgttaacgaatacataacttactggaatcaaaaaagaataaaactcagtcttgggggactcagcccggtagaataccggactgagtatcaaaaagccggttaactgaaactgtccaggttttggggttcagttcatggcgcgttttatcaggccagcgtcgcatcagatag

SEQ ID NO: 250 - DNA, 3221 bp, Escherichia coli
tatgaaacctcgtgttgtgttgtttttttgaactacgcagcaatgcgtgtgtaattttgtaattccgtttgttgtattggtttctttacattttatgtaactgaattatgatgatagtactttcaactatcacaagataatggtatatgcgcgagaatgcacctgctttatgtagatgtgttgattttctggataaaaaaaaagcaattgtaagtttttcatcacatttaatagatactttaagtctgataacatactgttttaactagctatatgtcggatttgtctgcctgctgaacaccatgccttagccaccagcacaataatcttacaaaaggtcatataagaataaatagatgttaataatacaatggggttgtaacgcgagtatttaaatataatattgcgagctaagtgaaaacgttaagtaattgaaataatttttcattaaaagcgtttcttattgatcgagaaataagttttctatttaatgcaaaaaagttaaggataaacgggaatgaaataaagtgggcgatattgtttacctgagaataatcggtgagaagcagggcgatatttcttcaggctgtgggacgtatgcgtcggttggtaatcgctggcaggttggccatgaagatgaaatttttgcctttgcactcaccaacgccattaccagtactggtaaaggcgttaatctacaggggctacaattttgcaaactcattgataaaagctcaccgctactgtctaatgccatcaatcagaatgagcggttatttattgaaatcgatttgtatcgtataaataaaagcgggcgctgggaacggtattattatattcagctaagaaatgcttcattaactgctattcatgtaaacatttctgacaataatcttcctaccgaatgtgtaaatgttaattatgactacatattatgcaaacatctaatagccaatacggaatttgactggttggcctttcctgctggctataatagcttatttattccacctaaaaacccacctgccagtaatcttaaccctgagccgctaccagttgttaaccttccactctctccaccagcggttaaaccggtctatgccaaatcctgtctgaaggagaagggatgtacagatgccggaacggcagaagaacccgctgaaaacttcgggcaagtagcgatttttgctctgccagtggttgatgactgctgtggataccaccatccggaggctaacgatgttgggcaacccgcagaagctcaaaccatgctactgtttccgggtagtgtgttggcggctcaaatatggggaaaatggtcgctcagtggcatactcagtgcaacccgcggctcttacatcggtgcgttggcatctgctttgtatattccctctgcgggcgagggcagtgctcgtgtgcctggacgtgatgagttctggtatgaggaagaactgcgccagaaagcgcttgcaggcagtaccgccactacccgggtgcgttttttctggggaactgacattcacagcaagccccaggtatatggtgttcatacgggtgaaggtacgccgtatgaaaacgtccgcgtggcgaacatgctgtggaacgaggagaggcagcgttatgaatttacccccgctcacgatgtcgatggccccctgattacctggacgccggaaaatccggaacatgggaatgttccgggccataccggtaacgacaggccgccgctggatcagcccaccattctggtgacgccgattccggacggcaccgatacctataccacgccgccattcccggttcctgatccgaaagaattcaacgattatattctggtttttccggcgggatccggtattaagcccatctatgtttacctgaaggaggatccgcgaaagctgcctggtgttgtaacagggcgcggcgtcctgctttcaccaggaactcgctggctggatatgtcggtatccaataacggcaacggcgcaccaatcccggcgcatattgctgataaattgcgcggacgggagtttaaaacctttgatgagtttcgcgaggcgctgtggctggaggtgagtaaagactcagtgttattggcgcagtttataaaaagtaatcagaataacgttagtcaaggatattccccctatgtccctgaggaggggtattattacggaccaaatgagatagttaagaaattccagatacatcatgtagttgctatagaacatggtggtggagtgtatgatattgataattttaagaatggtaccgccccgactacatgatgaaattcactacaggagataatgtatatgcgtgatttaaaagataaaatatatttttacacagaaggtgaatttcttgaaatgcttgaggagatagtaaatgcaactagcaaagataaatccctaaaagggaaaaaattagaaaaatatctcgataccttagtggatcatttcattaaaattactgaacatcctaaaaagggagatctcattttctatcctaattcccaagaagatggtgaacctgaaaacatcctgaaaatcgtcaaagaatggcggcgttcacaggggctacccttgtttaaagactctaaataaagtagataataaaactatatatgaaacatcatcgcgtctggctaatgcgatgatgttaataacataaaataataatgtggttgctcttaaaaaacaggtaaaaaatactgaaatcattttatcaatttctcgcgttcaccgataccctttggctggaggtgagtcagtatccggagttgatagcgcagttttcaagtggtaaccaaacacgtataaaacaaggattaaccgcaaaagcacctcttgaaggttggcattatggccctaaagaaatcgttaaaaaattccagatacatcatcgtgttgcaattgaatatggcggcagcgtatacgatattgataatttacgaattgttacccccagactacacgatgagattcactacaggagataaatatgtttaaagaaaagctcgaagattataccgaggaggaatttcttaattttttaggcggattgagatcaactatgaaagatggaaagcccttaaaaggtaaggagctagaaatgtactgggattcattagtagatcattttattgaaattacacagcatccgtcagggagcgatctaattttctaccctaaaagtcaaggagatgataagcctgaaaa

SEQ ID NO: 251 - DNA, 48012 bp, Escherichia coli
  CDS (12004)..(20508)
  CDS (40330)..(44949)
  misc_feature (13480)..(13480): Unsure
  misc_feature (31038)..(31038): Unsure
  misc_feature (31042)..(31042): Unsure
  misc_feature (31770)..(31770): Unsure
  misc_feature (31799)..(31799): Unsure
  misc_feature (44922)..(44922): Unsure
gtcattcgtcttctgaatcaggtgtaatgacctttacagaagcattccggcagtgcgtaacataatctgccggtaacggacgatcgctaatcagaacatcaaatgcagagagcggtgcgaggctggcagaggctacttcatcgaacaaggcgtggcgggcgagcaaaattttccttagtccacgggccatcgctttacgcttagtggcaagatcttcgggattaaaccagctgacgccaaagtgatcatgtacaccgctggcggaaataaatatttttcgcggattgagagagtctaatggcgaagagttactggcatcgtaaaaagcatcacttctggcacgatacgtaccaccacaaagtattgctgtcacattaggtttttcattcaacgcaacaaagacacgatgtgagtaacagatgccagtgaaggtgattgcatccgggatcatgcttataacgagcggtatctcctggccattatcaaagaagatcagatcattttcattaaccattccggcggccagaattgcaataggtaagtcatcacgatgatttctcggaacgtcctggattactggcatggatggtgcgggtttatgcaccattacaatatagccacccagtagggtcagtggcagaggttcatcttcctgatggagatcgcgacgaatagtcattacagaaacttccagcattcgtgccgcgtctttcaaatggattctgtcggttttcttaagtatttcaatcaaacgtcggatacgctctttttgcttcgtttccatcaactctctctccgtaaaaatgttataaaaataacattatggcattagtaaacattgttttagttaccatactatacgaccgaccctttgaaatgaaaagggtatagactgctgaattttcggtattaatcctgttaggttgcttatgattagatagtgttggcctgagtgataagactggaagtctattaaataaacatcgggttgatgtgctaatcgcgatctcagtcacaaatgatgcaaaagtaacatgctaatgttatttaaataccattgttatgcgaaagtttataagaggtagtgaaatggacattgcagttattggttccaatatggtggatctcattacttacacgaatcagatgcctaaagaaggagaaactctggaagcacctgccttcaaaatcggatgtggtgggaaaggtgctaatcaagcggtggcggcggctaaattgaattcaaaagtcctgatgctgactaaagtaggtgatgatatttttgcggataatactattcgtaatctcgaatcatggggaattaataccacttatgttgagaaggtcccctgtaccagcagtggtgttgcaccgatctttgttaatgccaactcgagcaatagtatattaataattaagggagcgaataaatttctttccccggaagatatcgatcgagctgcagaagatctgaaaaaatgcaaattgatcgttttacaactggaagttcaactggaaacagtttaccacgcgattgagtttggtaagaaaaatggtattgaagtgttattaaatccggctccggcattgcgtgagttagatatgtcttatgcctgcaaatgtgatttctttatcccgaatgaaacagaactggaaatattaaccggtatgtcggttgatacttatgatcatattcgtttggccgcacgttcgttagttgataaagggctgaacaatattattgttaccatgagcgaaaaaggcgcattatggatgacccgtgatcaggaagtccatgttcctgcattcaaagtaaatgctgttgatactagtggcgctggtgacgcatttattggttgcttttcccattattatgttcaaagcggtgatgttgaagccgctttgaaaaaagccgctctctttgccgctttcagcgtcacagggaaaggtacgcaatcatcttatccgagtattgaacaatttaatgaatttttaaccttaaacgaataatcatcctgcacagttaaaggtagcactatgaacgataaaaacatcattcagatgcctgatgggtatctgaataagactcccttgttccagtttattttgttatcgtgtttattcccgctatggggatgcgcagctgcattaaatgacatattaatcactcaattcaaaagtgtattttcgctaagtaactttgcttcagcattggtgcagagcgcattttatggaggttattttttaattgcaataccagcatcccttgtgattaaaaagaccagttataaggtggcaattttaattggcctgacgctgtatattggtggttgtacactttttttccctgcctcacatatggcaacctacactatgttccttgcagctatttttgcgattgcgattggcctgagtttccttgaaactgcagcgaacacatacagttcaatgatcggtccaaaagcctatgccacattgcggctcaatatcagccagaccttttatccgattggtgctgcgtctggtattttattgggcaaatatctggttttctccgagggggaaagccttgaaaagcagatgtcaggaatgaacgccgggcaaattcacaactttaaggtgctgatgttagagaacacccttgaaccgtataagtatatgattatgattctggttgtggtcatggtgttgttccttttaacccgcttcccaacctgtaaagtggcacagacaagtcaccataaacgcccgtcagcaatggatacgctgcgctatctggctagaaatccgcgctttcgtcgcggtattgtggcgcagttcctttatgtgggtatgcaggtcgcagtatggtcatttaccattcgtctggcgctggagttgggcgatatcaacgaacgtgatgcttcaaacttcatggtctatagctttgcctgcttctttattggcaagtttatagccaacatccttatgacgcgttttaatccggaaaaagtattgattctctattccgttataggggcgctgttcctggcatatgttgcactggctccaagtttcagcgcggtctatgtcgccgtcctggtaagtgttttgtttggcccttgctgggcgacgatctatgcaggaacactggatacagttgataacgaacatacagaaatggcaggagcagtcattgttatggctattgtcggtgccgcggtggttccagcaattcagggatatattgcagatatgttccactcactacagctttcattcctggtttctatgctctgctttgtctatgtcggagtctacttctggcgtgaaagcaaagtacgtaccgcactggctgaagtcacagcgtcctgaggagaaccgttatgagtacgcgtattaatttgtggcgggcgctttttggcgagaaacctcgtatcttgctggaaaatagtgattttactgtcacgtcttttcgctatgacagcggtgtcgaggggcttaaaattgcaaacagtcgtggacatttgattattcttccctggatggggcagatgatttgggatgcgcaatttgatggacacggcctcaccatgtgcaatatgtttcgccagcctaaaccggcgacagaggtgatagagacctatggctgttttgcttttcattcaggtttgctggctaatggctgcccatctgcggaagatactcatctgctacacggtgaaatggcctgtgccgcgatggatgaagcatggctggaattagacggagatatgttacgccttaacgggcgttacgagtatgtaatgggtttcggtcatcattatctggctcaaccaacagtggtccttcacaaatcctctacactgttcgatattaagatggccgtaaccaatctggcttctgtagatatgccactacaatatatgtgccacatgaattatgcatatataccaaatgctacattcagccagaatatcccggacgaaatattaagattgcgtgaatcagtgccttcgcatgttaatcccaccgctcagtggctggcgtttaatcaacggattatgcagggagaagcctctctgtcgacgctgagtcaaccggaattttatgatccagaaattgtcttctttgcagacaaactggacgcttatacagatcagccagagtttcgcatgatctctcccgatggcactacgtttgttactcgtttctacagtgctgaactaaattatgtgacacgctggatcctttataacggagagcaacaggtagccgcctttgcattacctgcaacctgtcggcctgaggggtatcttgccgcgcaacgtaatggcacgctgattcaggttgcaccgcagcaaacgcgcacttttacagtcaccacaggaattgaataaccactcaaggcctgaacagcggcgcgcttatcgttaaggtaagcgcgcttttttacccgccaggacaagactatgatagcgttgcccttatagacgatcacattatcgtccactccaaatttgcgcaactactgtagagtggtgtactccacagcttctttgaggatctcaacttccattgttttcttaccgagcaagcactgcaactcttttatttatttgtagtggtcaacaaaaactggtcacaatttcagtttttttccagtatctattttccgattcgttcggcggtaatccaccgttatattcatgaggccggagtgcactataaaagtgtatgcgtaaaccgactgctgtatgtagccattaagccagtattggtaacataggtacccaccttttcaactagtggacacctgttatggaacaaaaaacattatcagctgaaccccgcaggtcattttcaaatgagtttaaacttcaaatggttacactggctttacaaccaaggggttctgttgcccgtattgcccgggagcatgatatcaatgataatcttctgttcaaatggctcaggctctcgctgatcaaagggcgtatatcacggcgtcttccgttaacgaactcttctggcattggcgttgaattattacctgtggagatgacgctgggatgagcggccttaccccgttttttacgcgaggtaattatgaagatcaatgactagccgtcgaaccgtgtgcatgaactgctgcactgaaacttctcagctgtaaaataatccttacgctacgtacttctcggagcgcttacaattaatcggatgcagtcctgactggaagaaagaaaaatggagaaaacaagaggaattaatatcctccacgttcctgaaatcctggaggatattaatgtcatcaaaatattagcgaacgataatccctaacaaaatacccagtgcgccaaagtcagcatcactgaaggtggtgttagcaaaaccaatatcacccagcaccggcaataagaatactggcaggaaggtaataagcaagccttgagcgaaggcacccaaaatcgcaccacgacgtccacccgttgcattaccgaatacccctgcagctgcacctacgaagaagtgcggcaccacaccaggaataatcacgatcatgttcagcagatacaacgtgaacataccgattaaacctgcagcaaagctactcaggaaaccaaccagtacagcgttaggtgcgtaagggaagacgaccgggcaatcgagagcaggtctggcattcggaaccagcttgtctgaaatacctttgaatgccgggacaatctccgcaatcaccatgcgcacaccctgcagaatgatgtacacgccagctgcgaaggtaatggattgcatgatagagaacatgaaccagtttttaccaccgctaagctctttcaccgcatctgcacccgcaaacaggcacgtcaccaggaaaattatgctcatggtaaaagagatagcaaccggcgtgtcgcgcaagaacagcagacttttcggcacattcatgtcttcagtcgagtgctctttattaccaaacttgctgccgatgaaaccggccaatacataagataatgttgagaagtggccgatggcaacgtcatcagaaccggtcactttcttcatgtacggatgcgcaatagccgggaaaaagaccattgccacgccaacaaccaaagagccaacggctataagcgtaacgccggtcatgcctgctgttgccagaattaccgctaccatcatcgacataaacaacgtgtgatgaccggtcaggaagataaatttccacggtgtgaaacgggcaatcataatgttgataaccatcgcaaagaacataatcatcgccatttctttcccgaagcttttctgcgctacggaaacaatggcttcattgttcggcacgacaccctgaataccaaaggcatgctggaaaatgtttgcgaagtcacccagtgacgacacaactaaacccgcccctgcgcctaaaatcacaaaccccataatggtcttgacggtacctttaatgcattcggttaccggttttttctgtgcaatcaggccaatcagggcgattaaaccgaccagcaccgcgggttcggaaagtacatcgctcatcaaaaaacgaaagaaatccatatcgcccccagcttacagtgcgcctaattcggttaatgccacggacaaacgttctctcatggctttcttatcaatcatattttccagggcgacgattttgcctgcgacagactgcgcgactaactgctcggcaatatctttggtgccgacatagatatcactcggcgtccctttcgcggagcccaggtcgacatgatcaacatcagcgctgatggacaaatccttcaaaatgcttttaatgctcatttccatcatcaggctggtgcctaagccgttaccgcaaaccactgtaattttcataaatgttcctcagaattaatagcgcgcaataacagacaaaatgtcctgcgtcgttttggccgtcaaaatagcctgtatgtctttttcgttatcgaataacttggcgagttgagaaatcgcttcaatgtggctggtactgtcggttgcagccagcacaatcagtaatttcactggatcgttttcatcggcatcaaaattcacacctgaagggatcagggtcagtgctaatgacagcttgttagccccctcttccgggcgcgcatgaggcatcgcaataccagggccaaccacatagtacggaccgatagtgtcgtgcgagtgatagatcgcatcaacataacgcggttcgatagaaccgttttcaatcaacggtcggcatgaaatcgccacggcttcccgccagtctttgacctgttccacgacctgaacgacctctgtatttaatagattttttaacatacgactgataactcccgatgataattaacaggagagtagatattttacgcattaattaatgtgatgattgtcgcatttgatagcgctatctgataacgctaccaatctttgtgatagcgctatcatttctctgccgccatgctttggctatattcggttcctgcatatacaatgcaacaggatatttgctaccgtgggcaaaaactggaaagagtaatggtaaaataaaagtaatgaaaacagctggttgtaattatccatggagtcgaaatggaaaaaacacgtaagcgccgtggtaccggacgggtgacgctgcaggaggtcgctaactttgcaggtgtcggaaccatgaccgtctcccgcgcgctgagaacaccggaacaggtttctgacaagctgagggaaaagatagaacaggccgtagaagagttgggttatattcccaacagaactgctggcgcccttgcatctggtcacagtcatacagtcgccgtactggttccttccctgacagataaagccagctcccgctttatgcagtcgttgcagcaggtgcttaataaaaatgaattccagctactgcttgggtgtcatgagtataatcagctcaaagaagctgaaattctgatgacgcttcttcaaggcaacccggcggcgttagttatttttggttctcagttggctgataaaactcaccagatactcgagaaaacaaatatacctaccgttaacgttgtcggttcccctttcagtccggctcaaattaccatcgaaacagcattttttgaagcatcacataaactgaccgaacatctgctggagcagggttataagaatatcggatttatcggtgcgcatatggaaaaccgcctgcaacgtcagcaactgaacggctggcataaagcaatgctgagccattaccagaacactgatcttgttatcacaatgccggatgccgcaagtctgcaattggggcgttacgcattaaacgagatattactgcgacaaccagagctggatgctgtgatttgcagccacgaagagattgcgctgggtatcatgtttgagtgtcagcggcgtttgttaaaaatccctggaaatatcgctgtagcttgtcttgacggttcagacagttgcgatcaaacacacccaaccttgacatccatccgtattgactacaaaaaaatggggatagagacgggtaagttactgattggactattgaataataatcatgatgaatcagaagagtcgcgtatcgtgcaattcaactaccagatagaattacgtcagagtacatgagcctaaaagggcactattgcaaagttagctattgtggtagggatagccgtttccggctattccccgcgcagatccggatgtgtgctgctaacgcatccattcctacttcaggtatttggcgtagaagcggatgctaaaaacttgccgtaaaaccgcaatatcagcccgcagtgtcgctctccagattatccattcctatattgatgacaacgacacgtaagactgtgactcaccaaacttggatgtttttctgagcttaaagctcgttgcgtgaataaggcgagagtcagcgaatctcatcgaggcccgcagcaccggctgcaatagggatatagagcagcaatctaccgtcaacgtcaaaaacacggaagccttgcaaacgggatgcgttcatataaacaacatggagcagcaacaatacgatgcctgttgttgctcagtcaggaccttttctgccatgcgcgagccagcgtcacgattgatgaagaatgttctcaactgattaatttactgcaacagacgtggctggtaataagcgctggcggacaatgcagggtgaaaggctgttttcgggttgtccggcctgatacatcagagcaatacgttgcgttaaaaacggctgttcagtctctgatgccacggggtattgcaacaatcatccggtgatggacgggagaaatatcgactcttccgttagtttttacagactgataaagttttgccagctgaatctttatacggaatgctcttcagtatgcatatacgaattgactatctggcggataaaaactgctttacagaactgaatgaatctccacgccttcgccggcagtggcaggatgttctggaggagtgccggcagacagaggccgggccagaagaacggctgcgtattgctctgctgaatgtggattacgtcaccagttttgaactgccttttcgcttgttgcttactcgtacaccacaactgattgccgcgctgcgtgaagaatgggacatcagccagaaaaatgtggtgttcaacgataaacgctttggctgcgtgtacaacctgaaggccagcctttcgggtgggccggatacattccggtatcatctgtctcaccgtattcggcgggtggttgcgaatgaaaacacatcatcgccataccaactgattgcccgggaagtgaaagcgccccgtcaacggctgaagtatgcgctggagacaggattgcaggtgagcgcactggacggcctgttctggttcggcagccagcgcattgcggcagatatcctgaggctgagaaagtacgggatgcggattgcgacggcttctgtggacgtgtatgacaacataaccggaacaactcgtcatatccctgtatattactcctgacgcaaaatagtctgtgggggccggagcatgaccggtaaccggaacagggttttgccctcgtcacagccaaaaatacgtcctttatcacatttcttcgatttttcctgatattttaccgggttactgttcaaaaatgcttctcttctgatgtaaatttctttactgacactttttgacatgaatttacactggcatcacacaggccagaatacggggagaacatgcagcaccggcagaaaaacattctgacgaaaacgtcccttttatcccgtgcgttgtctgtcccctgttgtgatatgttccggcgcggctctccgtggatatgctatctctccctctccgttttttctggttgtttcatccccgcattttcgtctccggcagccatgctgtctccgggtgaccgcagtgcaattcagcagcaacagcagcagttgctggatgaaaaccagcgtcagcgtgatgcgctggagcgcagtgcgccgctgaccatcacgccgtctccggaaacgtctgccggtactgaaggtccctgctttacggtgtcaagcattgttgtcagtggggccacccgactgacgtctgcagaaaccgacagactggtggcaccgtgggtgaatcagtgtctgaatatcacggggctgaccgcggtcacggatgccgtgacggacggctatatacgccggggatatatcaccagccgggcctttctgacagagcaggacctttcagggggcgtactgcacataacggtcatggaaggcaggctgcagcaaatccgggcggaaggcgctgaccttcctgcccgcaccctgaagatggttttcccgggaatggaggggaaggttctgaacctgcgggatattgagcaggggatggagcagattaatcgtctgcgtacggagccggtacagattgaaatatcgcccggtgaccgtgagggatggtcggtggtgacactgacggcattgccggaatggcctgtcacagggagcgtgggcatcgacaacagcgggcagaagagtaccggtacggggcagttaaatggtgtcctttcctttaataatcctctggggctggctgacaactggtttgtcagcgggggacggagcagtgacttttcggtgtcacatgatgcgaggaattttgccgccggtgtcagtctgccgtatggctataccctggtggattacacgtattcatggagtgactacctcagcaccattgataaccggggctggcggtggcgttccacgggagacctgcagactcaccggctgggactgtcgcatgtcctgttccgtaacggggacatgaagacagcactgaccggaggtctgcagcaccgcattattcacaattatctggatgatgttctgcttcagggcagcagccgtaaactcacttcattttctgtcgggctgaatcacacccacaagtttctggggggggtcggaacactgaatccggtattcacacgggggatgccctagttcggcgcagaaagcgaccacgggaaaaggggagacctgcccgtaaatcagttccggaaatggtcggtgagtgccagttttcagcgccccgtcacggacagggtgtggtggctgaccagcgcttatgcccagtggtcaccggaccgtcttcatggtgtggaacaactgagcctcgggggtgagagttcagtgcgtggctttaaggatcagtatatctccggtaataacggcggttatctgcggaatgagctgtcctggtctctgttctccctgccatatgtgggaactgtccgtgcagtggctgcactggacggcggctggctgcactctgacagcgatgacccgtactcgtccggcacgctgtggggtgctgctgccgggctcagcaccaccagtggccatgtttccggttcgttcactgccggactgcctctggtttacccggactggcttgcccctgaccatctcacggtttactggcgcgttgccgtcgcgttttaagggattattaccatgcatcagcctcccgttcgcttcacttaccgcctgctgagttacctggtcagtgcgattatcgccgggcagccgttgttaccggctgtgggggccgtcatcaccccacaaaacggggccggaatggataaagcggcaaatggtgtgccggtcgtgaacattgccacgccgaacggggccgggatttcgcataaccggtttacggattacaacgtcgggaaggaagggctgattctcaataatgccaccggtaagcttaatccgacgcagcttggtggactgatacagaataacccgaacctgaaagcgggcggggaagcgaagggtatcatcaacgaagtgaccggcggtaagcgttcactgctgcagggctatacggaagtggccggcaaagcggcgaatgtgatggttgccaacccgtatggtatcacctgtgacggctgtggctttatcaacacgccgcacgcgacgctcaccacgggcaaacctgtgatgaatgccgacggcagcctgcaggcgctggaggtgactgaaggcagtatcaccatcaatggcgcgggcctggacggcacccggagcgatgccgtatccattattgcccgtgcaacggaagtgaatgccgcgcttcatgcgaaggatttaactgtcactgcaggcgctaaccgtgtaactgcagatggtcgtgtcagagccctgaagggcgaaggtgatgtgccgaaagttgccgttgataccggcgctctcggtggaatgtacgccaggcgtattcatctgacctccactgaaagtggtgtcggggttaatcttggtaacctttatgcccgcgatggcgatatcaccctggatgccagcggcagactgactgtcaacaacagtctcgccacgggggccgtcactgcaaaaggtcagggcgtcaccttaaccggcgaccataaagcgggaggtaacctgagcgtcagcagccggagagatatcgttctcagcaatggaacgcttaacagcgacaaggacctcagcctgaccgccggcggcagaatcactcaacagaatgaaaaactgactgccggccgggatgtaacgcttgccgcgaaaaacatcacacaggataccgccagccagattaacgcggcccgcgatatcgtgactgtcgccagtgacacgctgacaacacagggacagataaccgccgggcagaatctcacggccagcgccaccacgctgacgcaggacggaatattgctggcgaaaagtcatgcgggactcaatgccggtacgctgaataacagtggcgccgttcagggagctaccctgacgctcggcagtacaacgctcagcaacagtggctccctgctcagtggcggtcccctgaccatgaatacccgcgactttacccagagcggccgcactggcgcgaagggcaaagtggatatcatggccagtgggaaactgaccagtacaggtttgctggtgagcgatnatgcactggtgctgaaggcgcaggatgtgacacagaacggtgtgctgtccggcggcaaagggctgacggtcagtgcgcagacgctgagctccggtaaaaaatcggtcacccacagcgatgctgcgatgacgctgaatgtgacaacagtggcgctggacggggaaaccagtgccggtgacaccctccgggttcaggcagacaaactgagtaccgcagcgggcgcacaacttcagagcggcaaaaatctcagcatcaacgccagagatgcacgtcttgcaggtacgcaggcagcacaacagaccatggtggtgaacgccagtgaaaagctcacccacagcgggaaaagcagtgccccgtcgctcagcctcagtgcgccggaactgaccagcagcggcgtacttgttggttccgccctgaatacacagtcacagaccctgaccaacagcggtctgttgcagggggaggcctcactcaccgttaacacacagaggcttgataatcagcagaacggcacgctgtacagtgctgcagacctgacgctggatataccggacatccgcaacagcgggcttatcaccggtgataatggtttaatgttaaatgctgtctccctcagcaatccgggaaaaatcatcgctgacacgctgagcgtcagggcgaccacgctggatggtgacggcctgttgcagggcgccggtgcactggcgcttgctggcgacaccctctcacagggtagtcacggacgctggctgacggcggacgacctctccctccggggcaaaacactgaataccgcagggaccacgcagggacagaatatcaccgtgcaggcggacagatgggcgaacagtggttccgtgctggcaaccggtaaccttactgcttcggcaaccggtcagttgaccagtaccggcgatatcatgagccagggtgacaccacgctgaaagcagccaccacggacaaccggggcagtctgctttcggccggcacgctctcccttgatggaaattcactggataaccgcggcactgtccagggtaaccatgtcacgattcgccagaacagtgtcaccaacagtggcacgctcaccgggatcgccgcactgacgcttgccgcccgtatggcatcccctcaacctgcgctgatgaataacggaggttcattgctgaccagcggcgatctgacaatcaccgcaggcagtattaccagttccggacactggcagggcaaacgggtgctgatcaccgcagacagtctggcaaacagcggggcgatccaggcggctgacagcctgactgcacgtctgacgggtgagctcgtcagcacagcgggcagcaaagtcacctcgaacggtgaaatggcgctcagtgcactgaatttaagcaacagcggacaatggattgcaaaaaatctgaccctgaaggcgaactcactgaccagtgcgggtgacatcaccggtgtggatactctcacgctcacggtgaatcagacgctgaacaatcaggcgaacggaaaactgctcagtgcaggtgtgctgacgctgaaggcagacagtgtcacaaacgacgggcaattacagggaaatgtcaccaccatcacggcaggacaactcacaaacggcgggcatctgcagggcgaaacgctgacgctgacagcctccggtggcgtgaacaaccgttccggtggtgttctgatgagccggaatgcactgaatgtcagtactgcgaccctgagtaaccagagcacgatacagggtggaggcggggtttccctgaacgccacagaccgtctgcagaacgacggcaaaatcctctccggcagtaacctcacgctgacggcgcaggtgctggcgaacaccggcagcggactggtacaggctgccaccctgctgctggatgtggtgaatactgtcaacggcggacgcgtacttgccaccggcagtgcygacgttaaaggaaccacgctgaataataccggtacgcttcagggtgcgkacytgctggtgaattaccacacattcagcarcagcggtaccctgctgggaacctccgggcttggcgtcaagggcagttcactgctgcaaaatggtacagggcggctgtacagtgcaggcaacctgctgcttgacgctcaggacttcagtggtcaggggcaggtggtggccaccggtgatgtcacactgaaactgattgctgccctcacgaatcatggtaccctggccgcagggaaaaccctttccgtcacgtcgcaaaatgccatcaccaacggcggtgtcatgcagggtgatgccatggtgctcggtgccggagaggcattcaccaacaatggamcgctgactgccggtaaaggcaacagtgttttcagcgcacagcgtcttttccttaacgcaccgggttcacttcagggcggtggcgatgtgagtctgaacagccggagtgatatcaccatcagtggttttaccggcacggcaggcagtctgacaatgaatgtggccggtaccctgctgaacagtgcgctgatttatgcggggaataacctgaagctgtttacagaccgtctgcataaccagcatggtgatatcctggccggcaacagtctgtgggtacagaaggatgcttccggcggtgcaaacacagagattatcaataattccgggaatattgagacgcatcagggcgatattgttgtaagaaccgggcatcttctgaaccagcgggagggattttctgccacaacaacaacccggactaacccctcatccattcagggaatgggaaatgctctggttgatattcccctttcccttcttcctgacggcagctatggctatttcacccgtgaagttgaaaatcagcacggtacgccctgcaacgggcacggggcatgcaatatcacaatggatacgctttattattacgcgccgtttgctgacagtgccacacagcgctttctcagcagccagaacatcacaacagtaaccggtgctgataatccggcaggccgcattgcgtcagggcgtaatctttctgctgaggctgaacgactggaaaaccgggcgtcatttatcctggcgaatggggatatcgcactctcgggcagagagttaagcaatcagagctggcagacggggacagagaatgaatatctggtataccgctacgacccgaaaacgttttacggtagctatgcaacaggctctctggataaactgcccctgctgtcaccggaatttgaaaacaataccatcagattttcactggatggccgggaaaaagattacacgcccggtaagacgtattattccgttattcaggcgggcggggatgttaagacccgttttaccagcagtatcaataacggaacaaccactgcacatgcaggtagtgtcagtccggtggtctctgcacctgtactgaatacgttaagtcagcagaccggcggagacagtctgacacagacagcgctgcagcagtatgagccggtggtggttggctctccgcaatggcacgatgaactggcaggtgccctgaaaaatattgccggaggttcgccactgaccggtcagaccggtatcagtgatgactggccactgccttccggcaacaatggatacctggttccgtccacggacccggacagtccgtatctgattacggtgaacccgaaactggatggtctcggacaggtggacagccatttgtttgccggactgtatgagcttcttggagcgaagccgggtcaggcgccacgtgaaacggctccgtcgtataccgatgaaaaacagtttctgggctcatcgtattttcttgaccgcctcgggctgaaaccggaaaaagattatcgtttcctgggggatgcggtctttgatacccggtatgtcagtaacgcggtgctgagccggacgggttcacgttatctcaacggactgggttcagacacggaacagatgcggtatctgatggataacgcggccagacaacagaaaggactgggattagagtttggtgtggcgctgacagctgaacagattgctcagcttgacggcagcatactgtggtgggagtcagtcaccatcaacggacaaacagtcatggtcccgaaactgtatctgtcgccggaagatatcaccctgcataacggcagcgttatcagcgggaacaacgtgcaacttgcgggcggcaatatcaccaacagcggcggcagcatcaacgcacagaacgacctctcgctcgacagttccggctatatcgacaacctgaatgcggggctgataagcgcgggcggtagcctggacctgagcgccatcggggatatcagcaatatcagctcagtcatcagcggtaaaaccgtacaactggaaagcgtgagtggcaacatcagcaatatcacccggcgtcagcaatggaatgcgggcagtgacagccaatatggtggtgtgcatctcagcggtacggacaccggtccggttgcgaccattaaaggcactgattcactttcgctggatgcagggaaaaacattgatattaccggggcaacggtctcgtccggtggagaccttggaatgtctgcgggtaatgatatcaacattgccgcaaacctgataagtgggagcaaaagtcagtccggtttctggcacactgatgacaacagttcatcatccaccacctcacagggcagcagcatcagcgccggcggtaacctggcgatggctgcaggccataatctggatgtcacggcatcctctgtttctgccgggcacagcgccctgctttctgcaggtaacgacctgagtctgaatgcagtcagggaaagcaaaaacagtcgcaacggcaggtcagaaagtcatgaaagccacgcagctgtgtccacggtgacagcgggcgataacttcctccttgttgccggtcgtgatattgccagtcaggctgccggtatggctgcggaaaataacgtggtcatccggggcggacgtgatgtgaacctggtggcagagtctgccggcgcaggcgacagctatacgtcgaagaaaaagaaagagattaacgagacagtccgtcagcagggaacggaaatcgccagcggtggtgacaccaccgtcaacgcaggacgggatatcaccgctgttgcgtcatccgttaccgcaaccggcaatatcagcgtgaatgccggtcgtgatgttgccctgaccacggcgacagaaagtgactatcactatctggaaacgaagaaaaaaagcggaggttttctcagtaagaaaaccacccgcaccatcagtgaggacagtgccacccgtgaagcaggctccctgctgtcggggaaccgcgtgaccgttaacgccggtgataacctgacggtagagggttcggatgtggtggctgaccgggatgtgtcactggcggcgggtaaccatgttgatgttcttgctgccaccagtacagatacgtcctggcgctttaaggaaacgaagaaatccggtctgatgggtaccggcggtattggtttcaccattggcagcagtaagacaacgcacgaccggcgcgaggccgggacaacgcagagtcagagtgccagcaccatcggctccactgccggtaatgtcagtattaccgcgggcaaacaggctcatatcagcggttcggatgtgattgcgaaccgggatatcagcattaccggtgacagtgtggtggttgacccggggcatgaccgtcgtactgtggacgaaaaatttgagcagaagaaaagcgggctgacggttgccctttccggcacggtgggcagtgccatcaataatgcggttaccagtgcacaggagacgaaggagagcagtgacagccgtctgaaagccctgcaggccacaaagacagcgctgtctggtgtgcaggccggacaggctgcgacaatggcctccgcaaccggtgacccgaatgcgatgggagtcagcctgtcgctcaccacccagaaatcgaaatcacaacaacattctgaaagtgacacagtatccggcagtacgctgaatgccgggaataatctgtctgttgtcgcaaccggtaaaaacaggggcgataaccgcggagatattgtgattgccggaagccagcttaaggccggtggtaacacaagcctggatgccgcgaatgatattctgttgagtggcgccgcaaacacacaaaaaacaacgggcaggaacagcagcagtggcggtggcgtgggtgtcagtatcggtgccggtggtaacggtgccggtatcagcgtctttgccggcgttaatgcggcaaaaggcagcgagaaaggtaacggtactgagtggactgaaaccacaacagacagcggtaaaaccgtcaccatcaacagtggtcgggatacggtactgaacggtgctcaggtcaacggcaacaggattatcgccgatgtgggccacgacctgctgataagcagccagcaggacaccagtaagtacgacagtaaacagaccagcgtggctgccggcggcagttttacctttggctccatgaccggctcaggttacatcgctgcctcccgggataagatgaagagccgctttgactccgttgctgaacaaaccggaatgtttgccggtgatggtggcttcgacattacagtgggcagacatacccaactggatggtgcggtgattgcctccactgccacaccggataaaaaccacctggataccggaacgctggggttcagtgaccttcacaacgaagcggattataaagtcagtcacagtggaatcagtctgagcggtggtggcagcttcggggataaatttcagggtaacatgccgggtggcatgatatccgccggaggtcacagcggacatgcggaaggaacgactcaggccgcagtggcagaaggcactatcaccatccgggacagggacaatcagaagcagaatctggcgaacctgagccgtgaccctgcgcacgctaatgacagtatcagcccgatatttgacaaggagaaagagcagaggcgtctgcagacagtggggcttatcaagtgacataggcagtcaggtggcggatattgcgcgtacacagggagaactgaatgcgttgaaggccgcgaaggaagcaaccggcgaaacacttcctgctaatgcaacagagaaacaacgtcaggaatatcttgcgaaactgcgtgacacgcaggcttacaggaatgaaatggcgaagtatggtaccggcagtgaaattcagcggggtatccaggccgcgacagcggcgcttcaggggctggcggggggtaatttagcaggtgctctggccggagcttcagcaccggaactggcacatctgctgaaatcaacagaaaaagacccggcagtaaacgccattgctcacgccattctgggcggcgcagtggcggcaatgcagggtaataatgtcgctgccggtgcagcaggcgcagcaacgggagagctggcagccagagcgattaccggaatgctgtatcctggcgtgaagcagtcagacctcagtgaagagcagaagcagacgataagtacgctggcaactgtgtcagcagggctggcctgcggtcttaccggaaacagcaccgcatcagcagcagtgggagcacaaagcgggaagaagskgtyragaataactactcagtgatggctggaacaatatcctgccatcaggaacacaggattacggacaggccgtagcctcgtggaatcagtatgctcaggacaataatctgacaccggagcaggttcaagaagggatgaatcgtatagctattggtgaagggccttcttgggggacaacatataaagtacacccggtagttcaggctggcggtgatgttagctttatccggggttatactttaagcggaactatagatgacaatcatatttcagttaatcaaggggatatttatagtataggtgctcatggcggagcctcgatcggattatcctttggcccgtatttcccgggattaataaattcaaatgataacgattattcgataaatggtggttttggcgttggtgcagtggggctttctacgggtaaagatggtgttagtttcacttttggttttggcccaagttggggttggagtgcaactgaaattaaaggcgttgacgttaatggcacttcaacaagtgaggtttatcgatatgattttaaataatttctatagtttactatttttattgatgcttgcgctgtcaatattttccttcacagtgctatttgctttgtttatatataaagatctcggtggtgtaaaatttgcccgggactcttttttgttttttgattatatattttttagttctgacatgagagcaaatgcctctgcactatcggttatctgtgtttttatatttggattggcttttgatcataatcgtaatccacttgttaagaattacttgatcgatatagtatggtttttaggtgttgttttattttttatacactgtcgttttttttctaatctggaatatggtaagacaaaaattatttttgtaagagagctttttttcaacctaaaaataaaactaaggttaatatttttatggttgtcacgattattattcatcatattgatattaaatcgtttttatcgttgatttgttgttgagaataatttacttggcggtagtgaatatgctcattctgcgtggatacgccagcatggtatcgacatggcgacatgtacagaaaactcttccggtgccgcctgccagaaagcaatgaatgagagggatgctgtagggctggctctggcaacaggtactgtggcactactccccggtagtgctcaggctatgtggggacttggagcaagtgcgaatgctggtatcagttatctggctgatggtactgtagatccggcaaaacgcaagccattgcaggctgggtgaatgtgttcagcatgggtaatggcctggcggggactgtgggctggaatgctgcaggtggtgcgctgggtaactggatcggcaacaaagatcctctgtctggtgcaatttcaaatggtatcggttctgctgccgggtatggtatcggtaaaggtattacttaggggacagataagattacgaatgctgtaggaaaatgggtgacaaatggctgggatcctaagtacgatccaacatggataaaatatgctgaagtaaatcgtaacgatatcattcgagaaggcatgaaaccgagcaatattcctggaactgctggagatattggcggttctataggatccgagctaggtggaaaagtaacagataaagtatctgaggaactcaagaaatgaaatattcttttcgagtggtaataggtaagtttattatatgcagttcaattctcttattgtgttttattggcatgatcttagcggccataataactaaactaacgtttgtagcgttagcatggtttcaaagcgggatttttgaagttttgtggagcgatattgtttatgctgctcagttgggtggtctgggggggggggcatattaggtttttgttgggttttgttatatctttttagggcaaagggctttagttgagaataactacctgagcgtgtctgaaaagacagaacttgagatagcaaaacagacgcttaaaaacagtaaagatccggcagaacgtgaaaaggtacagcagaaatatgatgcattgcttgaaaaagatattgccagtgataaggaggttattgctgcctgcagtaatggtaatgcggggagttcagcgtgtgctagcgcaaggctgaaagttattgcgtcgaaagaagggtackgaagatggcccttataagagactgtaattaaaattgtgtaattgcctgtttttgatatgttcactccaacaacggagacaggcaaacgatggacgaaaagaaacttaaagcccttgcggctgactggccaaaggccttaaaaccgaagccgacctcaaccagttttcacgcatgttgacaaagcttaccgtcgaaacggcgctcaatgcagaactgactgaccatctcggtcatgagaaaaatgctcctaaatcaggctctaatacccgtaatggctactcgtcaaaaacggtattgtgcgatgatggcgagatcgaacttaacacgccgcgtgaccgtgaaaataccttcgaaccgcaactaattaagaagcatcagacacgcatcacccagatggacagccagattttgtccctgtatgccaaaggcatgactacgcgggaaatcgttgccacgttcaaagaaatgtacgacgccgatgtctcgcccacgctgatatccaaagtgaccgatgcggttaaagagcaggtctctgaatggcaaaatcgaccgttggatgcactgtatcccattgtttatcttgactgtattgtggttaaggttcgtcacggcgggagtgtcattaacaaagcggtgttcctcgcgctgggcatcaataccgacggtcagaaagagctgctgggtatgtggctggcagaaaatgaaggtgcaaagttctggctgggtgtactgactgagctgaaaaatcgtggccttcaggacatcctgattgcctgcgtggacggcctgaaaggcttcccggaagcgataaatagcgtgtacccgcagacgcatattcagctctgcatcatccatatggtgcgcaacagcctgaaattcgtgtcgtggaaggattacaaagccgtcaccagcgggctgaaagcggtatatcaggccccgacagaggaagcggcgttgatggcgttggataagtttgcaggcgtctgggatgaaaaatacccgcaaatcagcaagagctggcgcacacactgggaaaatctcaacaccttcttcggttacccaccggatatccgcaaggccatctacacgacgaatgccatcgaatcgctgaacagcgtcattcggcaggcgataaagaagcgcaaggtgttcccaacggacgactcggtgcgaaaagtgatttatctggcgatacagtcggcgtcaaaaaaatggagtatgccaatccagaactggcggctggcaatgagccgttttattatcgagtttggtgaccgccttagcgagcacctttaatacggcggcagttacacagaattatttacagggtcgactgggaacatattcaggcagtgtatctgaatccagaaaagaaacagcataatgtaattttattacaaaaggcgacaattagcttgaaaaacgccgttattgggtgttctactaccatgaaaatacgcatttttcacaccgcacattacgaaactcgcatcacggagaatgaaagctatcagacactggttgctatttttgaccacagaaggtagtgctgtttaccgccagagctgtgctggcggggagcgaatccgaaccatgtcgataattgtcaccggccagagaactatgtggcatcaattttgctgaaaaatactgcagcaatcagaggactgacgcccgggatttttaaacaaattcagttttcatcgtagtatcactttatcagccaagtcataaagttcagctgtattttgggaggtaaagcgatattatgattatattttatgtttgatagaaatatttcagggcagatacaataccatgggtataattcagttttttcagacacaaacaaaaataactattggatacattatttctgtcacagctttcttgttttgagtaaccataaaccaaatattctctaagagccactattgttttttcacttctgattggtgatatttcaatcagaagcgaaaagtgctcatcatttacacttgctcgttgtaatcctgaattatatgttttttttgcataagaagaataacgcatatacacactcaccaacttgtatttataaaatcattttgtaattcattatgtaatgaaatcaccttactccccttcaagttataagacatgaaagaataatttttttgcaatgtaagtttttacaaaacatgaataatatattcatggctcatacagaactaccataagaaggatgattaagaaaatactgttttatattttaagaatctctgagaaaggctgccttccggcagcctttcccccacatcagaacatataccggaaatttgcgtttaccgcattatccacgttatatttaccaaaggctgacttctcaaactccagaccaaagcgcatattgtcctttatctgcgcattcataccaacattaaacagcatccggctgtctttctcgccttttatccgtttctccccggacgcatcacgcagtaccgtctcaccattattcagtaggtcaaactgccagctggtcccggcacgggccgtcacactccagtccttaccactgaaggtcttgcccagttcaatccctgttcttccaatcagcggactgaagtccctgttcttcatgctcaggtccatatcaccgtctttccagcggaatgttttcccggacacggcgccgtaaaccagttcagcctgcggctcaatgaacgtttcctctgtcaggtgatagcggtaacccgtttcagcaccggcataccaggaatgggtgttgtagtgtttcgttcccagaccggcaaagttacctgtgtaatcattgtcatggtgaatatatttaccaatcaaatcgatataggcaccggactcaaacaatgctgaagcatacagaccgccccccaccgatttcgtcttgccgctgaacgcatggctgtctgcactgctgtcggtataggtcatcgtgacaccggtaaacaggtccactccgtccagttcatgttttttgtcaaagccgacctgaacatgggtgtaattatcactgtaaccaccgtctgcagaaccggcaccactcatgatgcgcgcccaggctccggcatcaccgtttgtgtcacgcaggtcacccatacgtttgttcagattgttgacttccgtcatgaagtttttatacccggcattcatgaaactgtcagccttcgcggcagcggctttatcagcctccgctttaaaaccgtccagtatccacttcgtattgccaccactggtgtcaacatgcagggttggagtcacccgactgaaacctatcatccgggtgccggccttaaacatctctgctgaagttcccgccggtgccgtgaccagaggaatattcagggactgtccctgagccggatccttcataaagctgacgttcaggctgttatctgaacccgtggctttttcagtcacattaattttatcggcatttttcaggtccgtacgcagaacaaaatcactgcctgttgcatccagtttattcaccgtcagggtacggaaagtacggtctccttcagaactgatacggctgtttctgacggtaagagtgtggatggcggagtccccacccagagtccacagtgcattatgcatactgacatcagccctgccaccggttatggcaccattgaatgctgcgttatagccctcaagaagactgccggcaaacgccgatgcagtcgtttccgcagaagccagttctgccggcgtgtcagacccgatggtaactgttgatgccgcagaggcatgaatatcaccggaagcatgtgctccacgggtaatttccagtgttgcgttatcgccggtcaggtcatatccgtccgtcagatatacagcaggggcatactggttagccgtatctttaaccggtgtaccgctcagggtgattttgctgttcttaccggcctgaatatgcccgtcgctgaaaagaccgttcagtgctgtaagatgaccgccatcatgcactgtcagtgaactgccggcaaaagcacccggggctgttaacaggacgtccggagaggtgatactgacggcactgtcataagcttcaatccctccggtgaaccggctgccgatatccagggttgagttatggtccagcgtaatattcccttcatactggctcctgtcattcacggtgtccgggacagaggtaccttcctccagaatgacataatttcctgttccgtcatttttatccacaaataccctgtcacttcccagtgtgatatggctgttatccgacttaatgtcactgttcagcgaggcgttacgtgaaagatggaagtcagcatctttcagcgacagtgttttcattatgaactggcggttttcccagtctttctggttcaggctgaccggcgcactgccactgacggaggcgtggataaccggatgcccctggaatatcagggtgccactgtcctcactcagggtaccttccggcaggttcacgctaccatcaaggatgacctttcttccccccggcagctgtggaatggtgacatccatattcccggtcagctgaccatgaaagataacgggttgttttgcccgcccggccaggatccggtcttttactgtctgaactgctttgtttttgtccgtgccaacaaattcccactgagccgggtcattcaggctgttcccccacagggtgttaccatagctggcagatttcagaatatagaagcgggtctggccgttgagtatcatgctgtataggtttcccggtgtgccggtaccgccaaagggggatatactgccaatcggaacactgacatttgtatcctgagccttaagatccagtaaaagccgggatttttgctgtgcattatttgtaatcaccgccccgtaatcggcagcctgcagtcgggtgaaggtaacggcattaccattaaggtcaagcttacctccccggtatccccatgaaatgttatccggattgacctgacgggcatctccgagcaccacggtcggtcgtccgctggcgaggttcacggaactgaaggcctgaacattacctgcagtgtctgcctgctggttaagtacaacggtaccgtctcccgttttcagtcctcccgggtttacacctgttccgtttatggtcagggttccttcccccaatttatgcaggttgtcaccggcaaccccgttgaccttccaggtcacattcgtccccttgtcagtaataatgccggcacccgtccaggtttttccggattcagcagatacggtgtaactgtctttaaattcgagataaccggccccctgagtcacactgtctttcaggacaattgcaccgttctgcccgctgaataccagatttttaccggcattgagatcattgtctttctgcccgtgcatggtccagtttttactgccctggctcagggtgcctgtgcctgatgttttgtcgtatgtccagttcagggggggcagtccggaaacaaagtccacgggggcatcgaaatcgtcctgcataacctggttcagataatctgttggtatgacattccaccagttcgtagcaccattaatacctgcatatgctcttaatacagcaacaataacccattttttttgttgttcatcataagcaaacaaaggagaaccactgtccccaggggcaccatagtcaggtaaaggtccgtttacaggattataggtttgcccgggattagagactattgttgcatcagatatcagaggaactcctgtggttcctcctgttttaaaagcatatccgccggcaaccttaactaaatttccgtccttgtccttagtgtactgcgtaccactacccacccgataaaaagcggtgtaacgttcagtgtctttataagcattggctttggttccttctgatgttatcgctgagggaataacttctgtaaccagtttattcagacgtggagcatggaagtcaacagaagagtggttattacggtcaacaagggaatatgtatttttcccattaccaaagctcacactctgatatcctccgttatgctttacgctgacgatatactgaggtgatacaagcgtagcaacgccatttgagctcacactgctgaaatcggccattggggctttatccagtctccccacaagttttccgtccttatcatataccggaatatctgtggcaccaggtacaaaaagccctttgttttcagcgaaatcacgataaatctgataggcaatatcggaacggacaatgcccgcctgggatatctgagggtaatacagatagactgctggaatgccagccagaagaatatgcgttaatcttcggcatgtcttttttattaccctgctggcaagttcagagacaacaataagtcccccggtgacagggcaatatttaagagaataaactttattcactgcggactctccatgatgtttaagtactaatgataaccagacgttatcacccgggcggaaaatatagtgactgcattaatgtatttttgtgatgtctgttacatagtgaaatacttttcgtttgcttacaaaattaccgctcctgcaatttttttcacatatgcggtattgtttttatatgtttttattactgccaccattaattatactcgtgatttttacttataaaaaataaacataacccatctaattttataacattgttaccctgggtatttacttaagagtattaccagagggtgattttatccggatatgacaagtataggttgcctcattcagtattcataaattatgtttaccacggagtacccgacttcctcatcgattgtcctcggatgactatttttattgtaaatgtaattgagatactacagcattttgtttaaatgccattctgttcataatcacttgtgcgatgtgcataacaccttaagtttttaacgactttctcgctgaaatactattttaaaacttcattttatgtctatatcttttaatggggtaatgttaaataaaaatttatttttttattggtgataaagaatgaaaatgcatgcaacaaccggcttttattgtcattgtcatttgtaagattcaaaaaaatcggacatttcttataatttcccagtgataataataagaaataataaatattttattattgttaccttcttttgttgtgatgagcatcacaatttattcctgaatcaattcattatgtatttgaattagttaaaacgtgcgcttaacgcgcaagctttccgtttccaagactgcctgggtatggtgaatcaggtctaacggcgcttgcaaggccaacaatcaacgaattaagcgccagacgtatggtcaaaagtagtggagtagaaaagggggaattatttgttggagtgcaaattcgccagctggtactccctttccctctggaagctcccttgtgcgtacctctccgcctttctcccttcgggaagcgtagcgctttctcattgaaccgccccgggtttcctggagagtgttttatctgtgaactcaggctgccagatcatcgtttccgatggaagcataataagctttttctgcttctgccggaggagtatggcccagcctttccagcaatcgtcgattgttataccagtccacccacgtgagtgtggccagttccacttctgcacggtttttccagctcttacggtgtattacctccgctttgtaaagaccattgatgctctccgccatcgcgttgtcatacgagtcgcctgtacttcctgttgatgccagtaatccgctttcntaanccgctggtgtaggccagcgatacatactgagaacctttatcactgtgatggaccgtgccggacggtcgacgggcccataacgcctgctccagtgcatccagcacgaatgtcgtttccatggacgatgagacccgccaccccacgatgtatccggcaaacacatcaatgatgaacgccacatagacgaagccccgccatgtgctgacgtaagtaaaatcagccacccacagctggtcaggtcgttctgccacgaactgacggtttacgcggtcgcctgcggcaacggctttccggctgatggtcgtacggacctttttaccccggagaacaccggcaagtcccataaccgccatgagacgtgccacagtgcatctggccactctgataccttcccgtaacaactgacgccagactttacgcacaccgtataccttgtgattttcatcgtatacgcgctgtatctctttcttcagccagtcatcgcgctgcgcacgggcactgcgtttatccggatgatgtcgctgttgctgacagtggtaatacgttgacggggcaatatgcagttcgctgcatagcggtccgaccccgtactgctcacgcagcttatccagcagtggcatcattttttccagaggcggtcgaactccgccttcgcaaaataagcggaagcctggcgaaggatatcgttactgcggcgcagttcacgawtttcacgttccagctctttnagacgctgacgttcagcggtggtgagccntccatcaccgcccccggtatcccgctcatgctggcgaacccagacacgcagagtctccggcgtacagccaatctttggagcaatggaacaaattgtcgcccattgtgagtcatattcgctctgactttccagaaccatacggactgcccgttgacggacttcgggggaaaaacgagtatttttagtcatcctgtttacctctttctcaggaagtttagtctccaggattcccggggcggttcacatagctcacgctgttggtatctcattttggtacaggtcgttcgctgcaagctgggctgtgtgcacgctccgttcgcaagcttgcctgctggttatacctgatgatgaaattattctgactcagaatgtgttatctttgttacagaaatattgctctcattaataagcagcggtgtccagctaatcactagaactttgcggtattactctgtttcctgcgtggtcctagatttgttccggataaaaacaattctcctctctgtggagttgtatccaggatgagatatacgtctccgtcctgaaaaagcaagtaattaatcaaaaatgtattttggttccatacatatagtatgtaatatcattcagacgcttacttaacttatttttagcatgcggtatactctaccgcgataatgcaaccgtacaatattgtgattgtgcgcttcccaaacgctgctctgtgactatctcatcattatttgtcaacgacggatgaaaagtagctcttccgcaacctgggtggaagaaaatggatgaaactttctggtgaacaaggatctaagctgttttcagttatgggcaacgcaatgcactctcttaagacacttctacagttaccttgcggatggtaatgcagtcgacaaattattagatctgacggtataaccctccatctccgcggaaaacgcaaaacagcgcaatgtcctgaatgctttaagcgtagcgattctgttcatagttgtccccggcgccggatacagcatctaccctgcacaggccagacgctatggcttgtattttccgtccgccactggtactgccgtaacccggcttgttcacgtaaaatttttgccgggtcgcttgctcccttagccagttcacaccagcagtcttcacagtcgttacaaaatttacagcgtcagatgggattaatagccggaggtgaggctggaaaacgggcagcaacgacagtgggtctccgttgcagtgcagatactcttcttcgcaggcttataataccctggagacgaaactgtcaggctcgccccatgtcggtattgatgagtggcgtggcatcggggccactgctgcggtatgttaatagtcaatcttgatactcaccgtcccctcgtcctgttgcacggtcgcgatcagcatacgctggcgacctggttcagaaaatatccggaaatacaggttgtctcgcgtgatcgctgcggaatcaatgcgacagcagcacgtgaaggtgcacctcaggccagacaggtagctgaacgatggcttctgctaaacaatattggcgatgcgcctgaacgaatgatgtacagacatatgactctgatacgtcttgttaccagttagttgtcaccaaaggaataacccggggcaaaaccatctgtgcctgcagtatcgctccgtcgtccggaacgccttaaacagcaaacccgcaaaaaacggcatcagctttggacagaggttatggccctgcataacaagggatgtagtttcagggaaatatcccgtattacaggcctgtcgcgtgtgacagtcagtcgcagggggcgttcaggaacattccctgaaatgtcaacccggcctccaaagcgagggcttctggacccatggagggagtggttaaaagagcaacgagaaagtggtaattataacgccagcaggatatggcgggaaatggtggccaggggggtacaggcagtgaaaccatcgtcagggatgctgttgccaaatcgcgtaaaggctggatcccaccggttactactgccgtcagacttccttcagacttccttcagtgtcccgggtaagccactggttaataatcaggggtgaagaaaattatgcttcccgatttattagtctgatgtgtgaaaaagaaccggagctgaaaatagcgcagcaactggtactcgagttctaccgtattctgaaaacccaaaataaatcacagctaagcagcttgttcactcgagtccacgaaagcggctcagcagaacttcggtgcgtggctgcggggatggaagctgatgctgcggctatatgtgaggcaatcagcagtcgctggagtaatggtgttgtcgaaggtcatgtaaatcgcctgaagatgttgaaacgccagatgtatggtcgagccggatttgaactactcaaacagagggtaatgagtccactggcatgagaatctccacccaggttgcagaagagccacttttccagttctgcatcagtaagtggaggtgttttttgagattttgtcatgtctttgctccggcctggttttatgttcagaagaccttcttcacccagtgccggataacggattcatttgagatattaaaccgtgcagcggcctcgcgcgtggtaagttcttcactcagagacttcaggacaaccgtcagtcgaaactcaggagtgtggaggtcatttttccatgtgatacgatcaatatcgtggagttaccagtctcttaccttacccagcagatgttttttcaacaccaaaacgtttagcgatacgacgtgcgccatcgtgtctggaaagataatgattaactacaaccaatctggtttcgagagaatattttggctttgccataaaaattgcacattaatcagttgggtctccaagttttggggtgcagtccacgtacaataaatttttatatccaccccccctttaatcactaccgccttggtcgctacatgatggataacaataatatctataatatagatattatctgcatataaaaattgatttttaccaaaaaaatgcccatttgttttattttataaataattttttgttttgagatttcactttttttagataaaaaccctacagagaagtaattttttagatgtaatctctagtattattggttttattggttttaaatttcatttaatggttttttgattgagggcaaaaaaaatttgatgcaaacaaatatgtatttataatgtgaatcaataataaattaaacattgaataatgtgtaatggtatggcagatcatatacagcggaatacgctaactcattatcgatttaatgtaaaaccagctataaataacatttcaaatgaacacttctggttactaatagaattatctggaattcgaagtgataagatcattatgtcattaagagagcacttagtagatggttttacaaaacgagaagtatgtgaaagaaacgatgtttcactgagttatttttctattagcttaaagaaaatatctcatatacataatgtctgcgcattgctaagtgaatattataataatagtttttagtgcaaaagcacggacaatcacgttattaatattttaaataaaaatcataaaaatgaagcgtaaacatttgttattattattgttgttttcattttccactaacagtgcgcctctttactccttaattagggaggcagttatgcacgatcccatagtaatggaagcccgggcggagttaacttcggcacaatcccgcatagagcaggcaagctctgcacattggccagttgtcacagctacaggaagtaaactcctttcacaaagtcaccgttattcctacgattatgacactgaagatattttacccggtattcgtggtgaagtgaatatatttgcttcaggggctattgaggcggatgtgcgtcggagtgagtcagaagccgaatattatcattataaaatggaagaaacaaaagaggaaacaattcactcttttgtttcattatatcttgatgcactcagggaaaaacaatccattgcggtacttgaacagagcctttcccggcataacgcaattcttaatgacctgaataccatcagtattcatgataccgggcgggagtctgagcttgttcaggccgaagccagaaggttgatggttcggcagcagataaattctaggagcagagtacttaaaaccacgctgggaaaactgtccacttggacaaaaaatccggtaaccgaagctgatcttgaaaatcctttttctaggatgacagaggccaaattattaactgattttacacaggctccacagaaaggtaacccgtcgtggcttgccagccaagctgatgttgagagtaaaaaagcggcactgaaagcacaggagcttgcccggtaccctcgggtggatttaacggggtctgtaacccgggatgaccagcagataggggtcaatctgtcttgggacctctttaaccgtaatgccagttatggtgttacagaaaaagctgcgcaaatagtggcagctaccggacgactggactctgtcgcccgaatgattgatgaaaccgggcgattatctctgataacagtcagacaaagtcgaggggaaatggaaacgctcagacgtcaggaacaggcttcagccagagttgtggacttttatcgtcttcagtttcaggtggcaagaaaaacactgattgaattactgaatgctgaaaacgaactgtacagtgtcggactctcccgggttcagacggaggatcagatgctccacggtatgctggattatctgtattcccagggaatgctcctgaaatggagcggagtgaatctttctggtgaagaagaaaaataacggggttgaagggttggtaattaagtgaagagtatttttgaaggattatcacagataacggcgttactgggtacacctgtatctgctgagactctggctgccggtactgtccgtacagatgtatccgggattgattttcgttctgttggcgagtttcttcgtagtgaaggatttgataatcatctttcccggcgatctccggaagatatcccgtcacttgcggttccggcgcttcttttattgaacgctcaggaagctattgtggtagtgcgtattgagggggccggtctggcaagacagtatcatgtgcttcagcctggaggtctccgtaagacactttctcacgatgcattaatggccgtttattctggttattgttggtttgttcagccacaggcaaagcaggatcgtcgctcggagctgccagagtatgacatgagcggggcatggttctggcgggtactgtggcgattcagggcatattacggacaggttattgttgcgagttttatcattaactttcttgctctggtcagttccctgtatgtaatgaacgtctatgaccgggttatacctaatcgttcctgggaaacgttatggatgctgagtatcggggtgattacagcaattctgtttgagtgtgctgcaaagttaatccggagttatctgacggatgttgcgggtaagaaggcagacctgattatcagctctgctctgctacgtcgggtgatggcggtaaaaatgtctgacaggccggcatcctctggttcatacgccagcaatttgcgggaatatgagtctgtcagggagtttatgaccagcgctacgttactggcttttgttgatctgccttttattctgcttttcatcagtgttatcgggctcgtgggaggctggcttgcggttgtacctcttacgctggtcccgctggttattctggcaggaatattactgcagcgaccgctttcccgtcatattaatgcctccatgcgggaatcatcgcagcgtcagggattacttgtggaggctctggacggaatagaaaccctgaagctgaataatgctgttaactgggttcagcgacgctgggatggatatactgcaagtgtcgcccgttcgtccattcgggtaaaaaataccagtaatgtcataatcagcttttccacagcaattcagcaaattaatactgttctgctggtcattctgggaacgtaccttattcacagtgatgacccacataaccgtatcaccatgggggcactgattgcagccgttattctttccggccgcgcgcttgcaccgcttggccagatagcatcactggccacccgtttccagcaggcccgtctggctatgcagggggtgaatgaaatagttcgccgcccggtggaacgggaaagtcagacacattatctgaccgtgaaggatatccagggggaattccatttcagcgcagtcacgtttttctataagcctgaattacctgcagccttgaaaggtatgtctgtctgtatccggcccggagaaaaggtgggcattattggcactatcggatgtggtaaatcgacgctactgaaaatgatggtagggctataccgtcaaaataaaggacaaattacccttgacggggttgctatgcagcaactggatccctgttttgttcgggataaggttttcctgcttgagcagaatccccggctttttctgggaactctgcgtgaaaatctgcagctttcgcgtcttccgggaagcctgtcggatgtggatatgattaatgcagccggacgtttcgggtttgaccgttttattcgtcatcacccatgcgggcttgatatgcagataggggaaggaggtcaggggctgtcaggaggacagcgtcagatggtcgctctgacgagaatggtactgggttctccccgggtagttctgcttgatgaacccacgacgggtcttgatctgcagacagagaacattgttctgaaagggctgaatcactggagccgtggacgcacaatggtggtggtgacgcatcgtctgcaggtgctgaatattgttgaccgtattatcgtgatgaatgaaggccgggtaatgatggatggtccccgcgatgaaatactgaaaaaactgtcagggaaacagcagagtggggagagcagagcgataacttcatgagcgtcaagcggataagaaataaagagcatatatgtttaacagtttgtggaccgcaggggtatgacagaaaaaacggaacggaataaagcgtcgtcagaggtggttaggcagtcagacctggccctgttgacagatgtacaggcagcccttcagcaggaaaagcatcatgcccttttcctgatggtgatttttctgctggtactggtagtgacgtttgttatctgggcatggaacagtcctctggatgaagtgacccgtggtcaggggagtattattcccggcagcagggagcaggttatacagacccttgacccgggtattttgaaaacacttgaggtcagggaaggagatattgttgagaaaggtcaggtactgctgacactggatgatacccgaagctctgccatgctgagggaaagtgaagcccgggtgaataacctggaagcagtcagggcaagactccgtgcagaagcttattccgaatcactgacatttccggatgacgtgcctgcagatttgagggagagggaaagtactgtttatcgactacgaaagactgaactggcacaaagcatcgccggccttaagcagagtaaggctctgctggataaggaaatagcaatgacccggccaattgtgcgtgaaggggcgatgtcggaagtcgaactgttacgtatgcagcgtcagtcagcggagctgcagttacagatggatgagaaacagaataaatacctgacggaagctggagctgaactagtgaagacagaagcagagcttgcacaggcaaaagagaatatggctggcagagccgacccggttgagcgttcacgtatcagggctcccctgagaggcatcgtaaaaaatattcgggtaaatactttgggaggcgtggtttctgcaggacaggacataatggaaattattccgctggaagaccagttgctgattgaggcttatataaatccacgggatgttgcctatgtcagaacagggatgccggcacttgtaaaactgacggcttatgactatgccatttatggtggtcttgacggagtggtgacactggtaagtccggatactttacgtgaccagaaacggccgggagatttaaaactggatccaaatgaagcatattatcgagtactggttactaccagtaataattatctgacagacaggaacggaaaaatattgccagttattcctggcatgatagccagcgtggatataaaaacaggtcagaaaagtgtatttcagtacctgattaaaccaatcaccagaatgaaacaagctcttcaggaacgatgatttattatattattaatatcatggctccgtaatacagacactcaacaggaagtctgtatcgtatcgcaatgaaaaaataattttattaaatttaaggagaataagtcacgtatagaaattattatttttccacctctggaaatgattaatttattttatattgataatcgcaggttttaattagcctaaggattttatatgaaaatgatttttaccggtaaggtcagcggagaaaaaaccgtgctgactgtcggaggtcgtcatacagttaaagcacagcccggggagcagtatggactgatcgatgaggtgaccggcctagtgcctgacggtgttgaggcggatcgctccggtgatgatttaattctgcgtaaaaaggaagaagatactgaggtccggatagagggattctgggaagaatgccagcccggggaaacacagtgtacggcggtatttaatattgttggggaagatggacaggtcaccgaagccgtactgactcaggatggcccggtgctggatgatattactgccggacaatcgggaaccttgtcagatgatgatcgtggcggttttatatggttgggcggtctggcatttggtgggggactggctgctatggctttagctgcaggtggcggtggaagcaaacatagacatgaaaatgatgactctgatactacagccccatcgtcaccagcactgaaggcagaggatgacggttctgtttctgttgagctgccgggtgatgccaataaaggcgataccgtggatgtcacctttgaagatgaaaaaggtggtaagcacaccgtgacgctggagaaaggggataacggctggacatccagtgatccgacgctgatcccggacagcactggcgataaagcgaccattccggcagataacgtgaaggataacagtgaagttaccggggttgccaaagatccgagcggtaatgaaagtgacccgtcaaccgtgacgtcaaaaactgatggtgtggcagatgccccggttctgagcattcctgaagtgactgacggttatgccaatgctgatgagctgaaagacggtttgcaggcagaggtcacgttgccggcaggcacggcagaaggtgcagttattacacttaccgtgacccgtccggacaaaaccacggagaacgtgacacataccgtgactaaagatgaagtggctgccggtaaagtatccatggatattccgaaggatgcggtgattgacgggcagaacagcgtcagtgtcactctgactcagggcagtaacccggcgaaacccgggaatgtggttgattttgctgccgatacccagatcccgggggataccgatggtgatggtgcaacagatgcaacaccggtagttgccattccggaagcggcagatggtgtgaatgccgaagagctgaaggatggtgtacagaccgaagtcacggtaccgaaaggcagcgctgccggtgataccctgacgctgacggtcaccaaaccggacggcacgacggacacggtggagcacacgctgaccgcagatgaagtggctgcaggtaaagctgatgtgaccattccggcggataaagtgacggcagatggtcagtattctgtaaccgcggaaatcacagacccggcaggtaacaccagtggccagggccagccggctgacttcgcagtggatacagtggcgccgtcggcaccggtattaaaagcagaggatgatggttctgtttctgttgagctgccgggtgatgccaataaaggcgataccgtggatgtcacctttgaagatgaaaaaggtggtaagcacaccgtgacgctggagaaaggggataacggctggacatccagtgatccgacgctgatcccggacagcactggcgataaagcgaccattccggcagataacgtgaaggataacagtgaagttaccggggttgccaaagatccgagcggtaatgaaagtgacccgtcaaccgtgacgtcaaaaactgatggtgtggcagatgccccggttctgagcattcctgaagtgactgacggttatgccaatgctgatgagctgaaagacggtttgcaggcagaggtcacgttgccggcaggcacggcagaaggtgcagttattacacttaccgtgacccgtccggacaaaaccacggagaacgtgacacataccgtgactaaagatgaagtggctgccggtaaagtatccatggatattccgaaggatgcggtgattgacgggcagaacagcgtcagtgtcactctgactcagggcagtaacccggcgaaacccgggaatgtggttgattttgctgccgatacccagatcccgggggataccgatggtgatggtgcaacagatgcaacaccggtagttgccattccggaagcggcagatggtgtgaatgccgaagagctgaaggatggtgtacagaccgaagtcacggtaccgaaaggcagcgctgccggtgataccctgacgctgacggtcaccaaaccggacggcacgacggacacggtggagcacacgctgaccgcagatgaagtggctgcaggtaaagctgatgtgaccattccggcggataaagtgacggcagatggtcagtattctgtaaccgcggaaatcacagacccggcaggtaacaccagtggccagggccagccggctgacttcgcagtggatacagtggcgccgtcggcaccggtattaaaagcagaggatgatggttctgtttctgttgagctgccgggtgatgccaataaaggcgataccgtggatgtcacctttgaagatgaaaaaggtggtaagcacaccgtgacgctggagaaaggggataacggctggacatccagtgatccgacgctgatcccggacagcactggcgataaagcgaccattccggcagataacgtgaaggataacagtgaagttaccggggttgccaaagatccgagcggtaatgaaagtgacccgtcaaccgtaacctcaaaaactgatgtgttaccaacagtgagtattagcgttgagacaacatcaacagatgtcaatggtgatggttttactggtatagctagtgtcaatgggaccgtaatggatgttcccgcaactattgaagataaggatgattccactggactggtttatacggtttctctgaatcatgtcactacaacagatgtaacagttacagttacattgggtagcggagctgggcattctgatgctgctgactattctgatattggtggagcacagcataacgggaaaattggccttcatggtgatactggaaaagtaacctatgatggtgcaacaaccgtaacaattgttattcctgccggttcaaaaagtgtttcatttatagttgatccaacgcttgaggctaaccaagatgcctttaatgccgagggtatggaaaaagttgttgcgaccattacgggaacatctgataacgttacggcagctactgacatcgttgataatgcgggagcatccgcaacaggtgttatttatgatggtaatgccatttcattacgtaatctggacggtgattttacactgaaatattcactatcatcttctatcgccgaaaaaggggactttgggtataccattggcgcgaatagtggtgaaaatgatccaatggtaacaacagattacaatgatacggtttatgttggttattaccagagtggtaaagaaacaacatcgtatagtaatgttgctaactcacaggataatgggccagacggaacaaaaaccgatggcaatcaaagcattacgactgttgatttaggtgctggtgatgatctaatggtcattcgtggtaacatgctggctaatacaagagtatatactggtgagggtaacgatacttttactatggatggtatgaatactgcattacgtgttatgtatgcgggtagttatatctttactgagtctggcgatgatattgttacgatcaaacgtactggtgtaacaaatgccggacagatttatcttggttcaggtagtgatacatttatccagggggatgctactgacaataacgatacaacattatctggtttattggatcttggtagtggtacaaaagatatatctaatatgcctaaggaatatctttctgtttatcaggatggcagtaatttaagcttgggtaacgacaacaatattgacactgccacagatgttaataccgtcactatttatggctctgtgtctggtgaaattttaggcggatacggcagtgataatattacggtaactaaaaatctgaccggtaatatttctgtcggtgacaatgcggataccttaacggccggatggatttatggtggcagtactgtctctatgggggacggcaatgatactgttaccatcacagatggtgcatataacacgactatttcactgggggcgggagatgatgtatttgatgcaacttctggtgtaatgggggattctgcttatgccactgtcgttaatggtgaagacggcaatgatacctttaaattaggcacaattgccaaaaacctgaccattgatgccggtgccggtgatgatattgttgttctgacaaaagactatgactccacctcctccggtaatcagggctatattaacggcggggaaggcagtgataccctggttctgacaggtaccatttctgtcaatctagcggccggtaaaaatgaaggtattgccggcttcgagaaagtggatatgactgttggtagcgatctgaaagctgacaatgcagctcagttagtcaagttaacnggcatcggatgtattgggtataaatgacaattcaacgatttatatttccggtgatgccaatgacaaagttgatttgggggctgacggagcgggaagtctgggtacatttacggcaacggcaacaactgttaaagcaactgcgttagatggtattgagcatacttatacgttatacagcagtgtaagtggcgcaaatgtgtatattgataacaatattattgatgcgaatggtgtaatttaatagttgtcttattcatgtgggagggaaacttcccacatttttgagtgttatagaaacaacttaataatttgcaaatgagtcaatatgacatttatatacttcttgtagaaggcataatgtatgaatataatgattgttacgcacaataaatatcttgagttaggtttgaaaaaattattgagcaggcattctattactattggtgctgatttttttataccagataatcgtgagcatataataaacaataatatttttgtcattctctgtgataaaaaaaacagtatgttaatgaattatatttttaacggttatagattttacttattaccagtagaatcaataagtagcctgtcatcgatttatgaatgtatgtttagtggcaggttgttgtttgggaactctccacataaattaaccatgaatgagatgattatactattctattatgttttccatgggtggaatgtagcaagtattgcttatcagtttggtatgagttcaaagactgtgtatactcatatatataaagcaaagaaaaaaaatggaatatcaggaaaaaatctcaaatataaatgtgcttatgaaaggcttgtctgttaattgaagtgttggtcgctttatatgaaagttatatgtgataatcgttatttccttattgggatcaacaaaacaattgaagatgtcatccagaaaaataaaattaatggcgtaaaaaatattattataatatcatcccctaaaacgtcagatgttttttgttttttacagttcaataacattgattttaggtgttcggataccattttttatgctccccctgaaacctttgattttctcagggatattatccacgcccctatttgcaatataaaggatttaactaaaaacaatccacttaataacacacattatatttatagagtaaagaactctcattataagctttctttatctggaaggcagaaggaggtcctgctgatgtttttatatggtttaagtggaaaagatattgctaataacctcggcgtttcaataaaaactgtttcgagttataaaaagtctttaatgaatagactgtatgtcagtaatgatatacagttattttacaaaggtctattattatgtagataagtgctaattgaacgcgtttgatattaacgacttcagcccagtctgttaccagttgagcatggtgataacgtgcaccatccagaatgatgttgactgtttgattataatcaggataaacctttcttatctcattgaaaaaccgggatatgcttaacgcattaatggttgggtactcactgatgagtgggcgttccggagacttcagatttagcgcacccatgatattcagccgtgtacggctacctgttgtttctattgctttccggtgcccttttcgtatccagccataactgattttggtggcctgagtggggtggacagcatctataaaaagaacaggttcatcgcctgctttttctttcaggtcttcataaattcaatgaattgcgcctgcctctcttcgctgaatttatgaggcgttccagccggttttttgtaagagaagccgttacgatgcaaccatttgttcataccggcaacgctgaacaaaattccccatgtgtggagaacaaaggcgataatttcatgagtatggtgaaacaaattatcagataaatgtttgattaagagtgatgtttgttcagcactgagtttactgtctgaaccaccgttttcgggctttaacttccctttattcataaactcatggatatgatgatcaacggtggtctgatgcaggcgcagagcctgagcaatcatgactgaactccagccttcagaagccagaagaatggctttaatacgatcgcagacccgcttgttacgactggtatcgtgaaggcgttccagctctgctttttgtagatcggagatgaagattttcatgttgcgtagcatgatcctctgtcatgacaaaatcaagcatcttcaatgatcacgggtatagcatcattattctataacatgaataaacggattgaatgtattatgttaaaaatgagtttatacgtaataatattgttattttcctttcagattagtgcagccattactagcaaggaaagtgaggctgtttcaccattattaatggatgttaattcttcactaacaatggaaatatttctgaatattccacatcatcggaaccatcgcaacagggcgtatttcctgtaatatgtactcgacttcatcctagatccgtaatgaaacgccagttattaacctgctaggggcctgtttttataattggtgatgatcctttttctctgcgctggatgagtgaacatctggagatccttaaatcgctaaatacccttggtttggttgttaatgttgaatcagtagaacgaatggaggtattacagaagcgggctgatgggttattgttattgccagttatctgcgataatttcgtgcaaatgctgcaattaaatgcttatccggtattgatcacagagatggaaatatcacaatgattaataacataattactgctaataatatcgtaattttgaaagtggtaatcctgttcacggcactataattagagttatgtcttgtatccgttcagtataatttcacgaatgctttattaaccggatgcgtgaatgtcattcttcagatgacaaagacgtcatcgcgattgatggaaaagcacttccacactcctatgataaaagccgtcgcaggagagcgggctttcgtagtcttaccccgactctccccggccctaaacgcaacacccactcacagcaacctaaactcatccgcatccc

SEQ ID NO: 252 - protein, 2834 aa, Escherichia coli
  misc_feature (493)..(493): The 'Xaa' at location 493 stands for Asn, Asp, His, or Tyr.
  misc_feature (1158)..(1158): The 'Xaa' at location 1158 stands for Asp, or Tyr.
  misc_feature (1159)..(1159): The 'Xaa' at location 1159 stands for Leu.
  misc_feature (1168)..(1168): The 'Xaa' at location 1168 stands for Ser, or Asn.
  misc_feature (1270)..(1270): The 'Xaa' at location 1270 stands for Thr, or Pro.
  misc_feature (13480)..(13480): Unsure
  misc_feature (31038)..(31038): Unsure
  misc_feature (31042)..(31042): Unsure
  misc_feature (31770)..(31770): Unsure
  misc_feature (31799)..(31799): Unsure
  misc_feature (44922)..(44922): Unsure
MHQPPVRFTYRLLSYLVSAIIAGQPLLPAVGAVITPQNGAGMDKAANGVPVVNIATPNGAGISHNRFTDYNVGKEGLILNNATGKLNPTQLGGLIQNNPNLKAGGEAKGIINEVTGGKRSLLQGYTEVAGKAANVMVANPYGITCDGCGFINTPHATLTTGKPVMNADGSLQALEVTEGSITINGAGLDGTRSDAVSIIARATEVNAALHAKDLTVTAGANRVTADGRVRALKGEGDVPKVAVDTGALGGMYARRIHLTSTESGVGVNLGNLYARDGDITLDASGRLTVNNSLATGAVTAKGQGVTLTGDHKAGGNLSVSSRRDIVLSNGTLNSDKDLSLTAGGRITQQNEKLTAGRDVTLAAKNITQDTASQINAARDIVTVASDTLTTQGQITAGQNLTASATTLTQDGILLAKSHAGLNAGTLNNSGAVQGATLTLGSTTLSNSGSLLSGGPLTMNTRDFTQSGRTGAKGKVDIMASGKLTSTGLLVSDXALVLKAQDVTQNGVLSGGKGLTVSAQTLSSGKKSVTHSDAAMTLNVTTVALDGETSAGDTLRVQADKLSTAAGAQLQSGKNLSINARDARLAGTQAAQQTMVVNASEKLTHSGKSSAPSLSLSAPELTSSGVLVGSALNTQSQTLTNSGLLQGEASLTVNTQRLDNQQNGTLYSAADLTLDIPDIRNSGLITGDNGLMLNAVSLSNPGKIIADTLSVRATTLDGDGLLQGAGALALAGDTLSQGSHGRWLTADDLSLRGKTLNTAGTTQGQNITVQADRWANSGSVLATGNLTASATGQLTSTGDIMSQGDTTLKAATTDNRGSLLSAGTLSLDGNSLDNRGTVQGNHVTIRQNSVTNSGTLTGIAALTLAARMASPQPALMNNGGSLLTSGDLTITAGSITSSGHWQGKRVLITADSLANSGAIQAADSLTARLTGELVSTAGSKVTSNGEMALSALNLSNSGQWIAKNLTLKANSLTSAGDITGVDTLTLTVNQTLNNQANGKLLSAGVLTLKADSVTNDGQLQGNVTTITAGQLTNGGHLQGETLTLTASGGVNNRSGGVLMSRNALNVSTATLSNQSTIQGGGGVSLNATDRLQNDGKILSGSNLTLTAQVLANTGSGLVQAATLLLDVVNTVNGGRVLATGSADVKGTTLNNTGTLQGAXXLVNYHTFSXSGTLLGTSGLGVKGSSLLQNGTGRLYSAGNLLLDAQDFSGQGQVVATGDVTLKLIAALTNHGTLAAGKTLSVTSQNAITNGGVMQGDAMVLGAGEAFTNNGXLTAGKGNSVFSAQRLFLNAPGSLQGGGDVSLNSRSDITISGFTGTAGSLTMNVAGTLLNSALIYAGNNLKLFTDRLHNQHGDILAGNSLWVQKDASGGANTEIINNSGNIETHQGDIVVRTGHLLNQREGFSATTTTRTNPSSIQGMGNALVDIPLSLLPDGSYGYFTREVENQHGTPCNGHGACNITMDTLYYYAPFADSATQRFLSSQNITTVTGADNPAGRIASGRNLSAEAERLENRASFILANGDIALSGRELSNQSWQTGTENEYLVYRYDPKTFYGSYATGSLDKLPLLSPEFENNTIRFSLDGREKDYTPGKTYYSVIQAGGDVKTRFTSSINNGTTTAHAGSVSPVVSAPVLNTLSQQTGGDSLTQTALQQYEPVVVGSPQWHDELAGALKNIAGGSPLTGQTGISDDWPLPSGNNGYLVPSTDPDSPYLITVNPKLDGLGQVDSHLFAGLYELLGAKPGQAPRETAPSYTDEKQFLGSSYFLDRLGLKPEKDYRFLGDAVFDTRYVSNAVLSRTGSRYLNGLGSDTEQMRYLMDNAARQQKGLGLEFGVALTAEQIAQLDGSILWWESVTINGQTVMVPKLYLSPEDITLHNGSVISGNNVQLAGGNITNSGGSINAQNDLSLDSSGYIDNLNAGLISAGGSLDLSAIGDISNISSVISGKTVQLESVSGNISNITRRQQWNAGSDSQYGGVHLSGTDTGPVATIKGTDSLSLDAGKNIDITGATVSSGGDLGMSAGNDINIAANLISGSKSQSGFWHTDDNSSSSTTSQGSSISAGGNLAMAAGHNLDVTASSVSAGHSALLSAGNDLSLNAVRESKNSRNGRSESHESHAAVSTVTAGDNFLLVAGRDIASQAAGMAAENNVVIRGGRDVNLVAESAGAGDSYTSKKKKEINETVRQQGTEIASGGDTTVNAGRDITAVASSVTATGNISVNAGRDVALTTATESDYHYLETKKKSGGFLSKKTTRTISEDSATREAGSLLSGNRVTVNAGDNLTVEGSDVVADRDVSLAAGNHVDVLAATSTDTSWRFKETKKSGLMGTGGIGFTIGSSKTTHDRREAGTTQSQSASTIGSTAGNVSITAGKQAHISGSDVIANRDISITGDSVVVDPGHDRRTVDEKFEQKKSGLTVALSGTVGSAINNAVTSAQETKESSDSRLKALQATKTALSGVQAGQAATMASATGDPNAMGVSLSLTTQKSKSQQHSESDTVSGSTLNAGNNLSVVATGKNRGDNRGDIVIAGSQLKAGGNTSLDAANDILLSGAANTQKTTGRNSSSGGGVGVSIGAGGNGAGISVFAGVNAAKGSEKGNGTEWTETTTDSGKTVTINSGRDTVLNGAQVNGNRIIADVGHDLLISSQQDTSKYDSKQTSVAAGGSFTFGSMTGSGYIAASRDKMKSRFDSVAEQTGMFAGDGGFDITVGRHTQLDGAVIASTATPDKNHLDTGTLGFSDLHNEADYKVSHSGISLSGGGSFGDKFQGNMPGGMISAGGHSGHAEGTTQAAVAEGTITIRDRDNQKQNLANLSRDPAHANDSISPIFDKEKEQRRLQTVGLIK

SEQ ID NO: 253 - protein, 1539 aa, Escherichia coli
  misc_feature (1531)..(1531): The 'Xaa' at location 1531 stands for Thr.
  misc_feature (13480)..(13480): Unsure
  misc_feature (31038)..(31038): Unsure
  misc_feature (31042)..(31042): Unsure
  misc_feature (31770)..(31770): Unsure
  misc_feature (31799)..(31799): Unsure
  misc_feature (44922)..(44922): Unsure
MKMIFTGKVSGEKTVLTVGGRHTVKAQPGEQYGLIDEVTGLVPDGVEADRSGDDLILRKKEEDTEVRIEGFWEECQPGETQCTAVFNIVGEDGQVTEAVLTQDGPVLDDITAGQSGTLSDDDRGGFIWLGGLAFGGGLAAMALAAGGGGSKHRHENDDSDTTAPSSPALKAEDDGSVSVELPGDANKGDTVDVTFEDEKGGKHTVTLEKGDNGWTSSDPTLIPDSTGDKATIPADNVKDNSEVTGVAKDPSGNESDPSTVTSKTDGVADAPVLSIPEVTDGYANADELKDGLQAEVTLPAGTAEGAVITLTVTRPDKTTENVTHTVTKDEVAAGKVSMDIPKDAVIDGQNSVSVTLTQGSNPAKPGNVVDFAADTQIPGDTDGDGATDATPVVAIPEAADGVNAEELKDGVQTEVTVPKGSAAGDTLTLTVTKPDGTTDTVEHTLTADEVAAGKADVTIPADKVTADGQYSVTAEITDPAGNTSGQGQPADFAVDTVAPSAPVLKAEDDGSVSVELPGDANKGDTVDVTFEDEKGGKHTVTLEKGDNGWTSSDPTLIPDSTGDKATIPADNVKDNSEVTGVAKDPSGNESDPSTVTSKTDGVADAPVLSIPEVTDGYANADELKDGLQAEVTLPAGTAEGAVITLTVTRPDKTTENVTHTVTKDEVAAGKVSMDIPKDAVIDGQNSVSVTLTQGSNPAKPGNVVDFAADTQIPGDTDGDGATDATPVVAIPEAADGVNAEELKDGVQTEVTVPKGSAAGDTLTLTVTKPDGTTDTVEHTLTADEVAAGKADVTIPADKVTADGQYSVTAEITDPAGNTSGQGQPADFAVDTVAPSAPVLKAEDDGSVSVELPGDANKGDTVDVTFEDEKGGKHTVTLEKGDNGWTSSDPTLIPDSTGDKATIPADNVKDNSEVTGVAKDPSGNESDPSTVTSKTDVLPTVSISVETTSTDVNGDGFTGIASVNGTVMDVPATIEDKDDSTGLVYTVSLNHVTTTDVTVTVTLGSGAGHSDAADYSDIGGAQHNGKIGLHGDTGKVTYDGATTVTIVIPAGSKSVSFIVDPTLEANQDAFNAEGMEKVVATITGTSDNVTAATDIVDNAGASATGVIYDGNAISLRNLDGDFTLKYSLSSSIAEKGDFGYTIGANSGENDPMVTTDYNDTVYVGYYQSGKETTSYSNVANSQDNGPDGTKTDGNQSITTVDLGAGDDLMVIRGNMLANTRVYTGEGNDTFTMDGMNTALRVMYAGSYIFTESGDDIVTIKRTGVTNAGQIYLGSGSDTFIQGDATDNNDTTLSGLLDLGSGTKDISNMPKEYLSVYQDGSNLSLGNDNNIDTATDVNTVTIYGSVSGEILGGYGSDNITVTKNLTGNISVGDNADTLTAGWIYGGSTVSMGDGNDTVTITDGAYNTTISLGAGDDVFDATSGVMGDSAYATVVNGEDGNDTFKLGTIAKNLTIDAGAGDDIVVLTKDYDSTSSGNQGYINGGEGSDTLVLTGTISVNLAAGKNEGIAGFEKVDMTVGSDLKADNAAQLVKLXGIGCIGYK

SEQ ID NO: 254 - DNA, 39061 bp, Escherichia coli; identical to SEQ ID NO: 148
  misc_feature (35920)..(35920): Unsure
  CDS (31941)..(34667)

SEQ ID NO: 255 - protein, 908 aa, Escherichia coli
  misc_feature (35920)..(35920): Unsure
VRCLSPVVICSGAALRGYAISPSPFFLVFLSPHFRLRQPCCLRVAGTLLNSALIYAGNNLKLFTDRLHNQHGDILADNSLWVQKDSSGTANSEIINRSGNIETMRGDITMNTAHLLNSWDAISASHEVIPGSSRGVISPVPENNRWWGVVRHDGVEYLAVYWGKGATVPDEYRIRTGDTDTVTVSATGHAARISGGADMHIRAGRLDNEASFILAGGSMTLSGDTLNNQGWQEGTTGKETVWRLASDSLPKAWFTEPWYRVYRQVSPDATEASGTSPVGQYRAVISAAGDVSASFATDTGNTTVMPRAGGSGNTITVPSLNSLTPPTVSQGVSGEALLNESGTGITGPVWNDALPDTLKDIPGALSLYGASVSSYPLPSGNNGYFVPSTDPDSPYLITVNPKLDGLGKVDSSLFAGLYDLLRMQPGEAPRETDPVYIDEKQFLGSSYILDRLGLKPEKDYRFLGDAAFDTRYVSNVILNQTGSRYINGTGSDLTQMKYLMDSAAAQQKALGLTFGVSLTAGQVAQLTRSILWWESVTINGQTVMVPKLYLSPEDITLHNGSVISGNNVQLAGGNITNSGGSINAQNDLLLDSTGSIDNLNAGLINAGGALNLKAIGDISNISSVISGKTVSLESATGNISNLTRTEQWAMNNGYNHFSGTDTGPLAAVRATDSLFMGAAGDISITGAAVSAGDSVLLSAGNDLNMNAIQAGERRRYGGSGWYETHAVAPTVTAGNSLMLSAGRDVNSQAAGITAENSMDIRAGRDVNMAAESTGAGDHDSTFSMKTVHDSVRQQGTDMTSGGDITVTAGRDITSVATAVTAKGDIRVNAGHDIVLGTATESDYHYSESGETRNRLLSHQTTRTITEDSVTREKGSLLSGNRVTVNAGDNLTVEGSDVVAEPGCVTGGG

We claim:

1. An isolated nucleic acid molecule comprising a nucleotide sequence or its complement, the nucleotide sequence is identical to at least twenty-five continuous nucleotides contained in DNA sequences selected from the group consisting of SEQ ID NO:1 to SEQ ID NO:251 and SEQ ID NO:254.

2. A recombinant nucleic acid construction comprising the isolated nucleic acid molecule of claim 1.

3. A host cell comprising the recombinant nucleic acid construction of claim 2.

4. A method for distinguishing E. coli bacteria of strain CFT073 from strain K-12 comprising analyzing the genome of the bacteria for the presence of any DNA sequence claimed in claim 1.

5. A method for detecting E. coli CFT073 in a sample comprising the steps of:
a) providing an E. coli CFT073-specific nucleotide probe, the probe comprising a sequence or its complement, the sequence is selected from the group consisting of SEQ ID NO:1 through SEQ ID NO:251 and SEQ ID NO:254;
b) contacting the probe with a sample of test material under suitable hybridization conditions; and
c) detecting hybridization of the probe to a complementary nucleotide sequence in the sample.

6. An isolated nucleic acid molecule comprising a nucleotide sequence or its complement, the nucleotide sequence is selected from the group consisting of the complementary sequence between nucleotide 1008 and nucleotide 1885 of SEQ ID NO:85, the complementary sequence between nucleotide 1996 and nucleotide 5607 of SEQ ID NO:85, the sequence between nucleotide 12003 and nucleotide 20509 of SEQ ID NO:251, the sequence between nucleotide 40329 and nucleotide 44950 of SEQ ID NO:25 1, and the sequence between nucleotide 31940 and nucleotide 34668 of SEQ ID NO:254.

7. A recombinant nucleic acid construction comprising the isolated nucleic acid molecule of claim 6.

8. A host cell comprising the recombinant nucleic acid construction of claim 7.

9. An isolated polypeptide comprising an amino acid sequence encoded by a DNA sequence selected from the group consisting of the complementary sequence between nucleotide 1008 and nucleotide 1885 of SEQ ID NO:85, the complementary sequence between nucleotide 1996 and nucleotide 5607 of SEQ ID NO:85, the sequence between nucleotide 12003 and nucleotide 20509 of SEQ ID NO:251, the sequence between nucleotide 40329 and nucleotide 44950 of SEQ ID NO:25 1, and the sequence between nucleotide 31940 and nucleotide 34668 of SEQ ID NO:254.

10. An isolated polypeptide comprising an immunogenic fragment of an amino acid sequence encoded by a DNA sequence selected from the group consisting of the complementary sequence between nucleotide 1008 and nucleotide 1885 of SEQ ID NO:85, the complementary sequence between nucleotide 1996 and nucleotide 5607 of SEQ ID NO:85, the sequence between nucleotide 12003 and nucleotide 2 0509 of SEQ ID NO:251, the sequence between nucleotide 40329 and nucleotide 44950 of SEQ ID NO:251, and the sequence between nucleotide 31940 and nucleotide 34668 of SEQ ID NO:254.

11. An antibody that specifically binds to the polypeptide of claim 9.
